United States Patent Application Publication US 2015/0086982 A1 - sequence listing, part 5

SEQ ID NO: 105 - DNA, 6387817 bp, Penicillium chrysogenum (residues 1-2,129,273 of 6,387,817)
  misc_feature (318994)..(319093): n is a, c, g, or t
  misc_feature (839421)..(839520): n is a, c, g, or t
  misc_feature (1326322)..(1326421): n is a, c, g, or t
  misc_feature (1326487)..(1326487): n is a, c, g, or t
  misc_feature (1326497)..(1326497): n is a, c, g, or t
  misc_feature (1382022)..(1382122): n is a, c, g, or t
  misc_feature (1399022)..(1399022): n is a, c, g, or t
  misc_feature (1471213)..(1471312): n is a, c, g, or t
  misc_feature (1769206)..(1769305): n is a, c, g, or t
  misc_feature (1939758)..(1939758): n is a, c, g, or t
  misc_feature (2142833)..(2142932): n is a, c, g, or t
  misc_feature (2145333)..(2145432): n is a, c, g, or t
  misc_feature (2203432)..(2203531): n is a, c, g, or t
  misc_feature (2255880)..(2255979): n is a, c, g, or t
  misc_feature (2262936)..(2263035): n is a, c, g, or t
  misc_feature (2346003)..(2346102): n is a, c, g, or t
  misc_feature (2451830)..(2451929): n is a, c, g, or t
  misc_feature (2470453)..(2470552): n is a, c, g, or t
  misc_feature (2477531)..(2477630): n is a, c, g, or t
  misc_feature (2483600)..(2483600): n is a, c, g, or t
  misc_feature (2605454)..(2605454): n is a, c, g, or t
  misc_feature (2605456)..(2605458): n is a, c, g, or t
  misc_feature (2618748)..(2618748): n is a, c, g, or t
  misc_feature (2747253)..(2747352): n is a, c, g, or t
  misc_feature (2772340)..(2772340): n is a, c, g, or t
  misc_feature (2786947)..(2787046): n is a, c, g, or t
  misc_feature (3008140)..(3008239): n is a, c, g, or t
  misc_feature (3042933)..(3043032): n is a, c, g, or t
  misc_feature (3053688)..(3053787): n is a, c, g, or t
  misc_feature (3646324)..(3646423): n is a, c, g, or t
  misc_feature (3688494)..(3688593): n is a, c, g, or t
  misc_feature (4078647)..(4078647): n is a, c, g, or t
  misc_feature (4424652)..(4424751): n is a, c, g, or t
  misc_feature (5594475)..(5594476): n is a, c, g, or t
  misc_feature (5695259)..(5695358): n is a, c, g, or t
  misc_feature (5800528)..(5800528): n is a, c, g, or t
  misc_feature (5804161)..(5804260): n is a, c, g, or t
  misc_feature (5962328)..(5962427): n is a, c, g, or t
  misc_feature (6113477)..(6113576): n is a, c, g, or t
  misc_feature (6114175)..(6114175): n is a, c, g, or t
  misc_feature (6114285)..(6114285): n is a, c, g, or t
  misc_feature (6114299)..(6114299): n is a, c, g, or t
  misc_feature (6114988)..(6114988): n is a, c, g, or t
  misc_feature (6115074)..(6115074): n is a, c, g, or t
  misc_feature (6115439)..(6115439): n is a, c, g, or t
  misc_feature (6115658)..(6115658): n is a, c, g, or t
  misc_feature (6144932)..(6145031): n is a, c, g, or t
  misc_feature (6263926)..(6263926): n is a, c, g, or t
  misc_feature (6264199)..(6264199): n is a, c, g, or t
  misc_feature (6264346)..(6264346): n is a, c, g, or t
  misc_feature (6264768)..(6264768): n is a, c, g, or t
  misc_feature (6266765)..(6266765): n is a, c, g, or t
  misc_feature (6266905)..(6266905): n is a, c, g, or t
  misc_feature (6267135)..(6267135): n is a, c, g, or t
  misc_feature (6267179)..(6267179): n is a, c, g, or t
  misc_feature (6267283)..(6267283): n is a, c, g, or t
  misc_feature (6268806)..(6268905): n is a, c, g, or t
  misc_feature (6277981)..(6278080): n is a, c, g, or t
  misc_feature (6284799)..(6284799): n is a, c, g, or t
  misc_feature (6284818)..(6284818): n is a, c, g, or t
  misc_feature (6284841)..(6284841): n is a, c, g, or t
  misc_feature (6284861)..(6284861): n is a, c, g, or t
  misc_feature (6284916)..(6284916): n is a, c, g, or t
  misc_feature (6285286)..(6285286): n is a, c, g, or t
  misc_feature (6285538)..(6285538): n is a, c, g, or t
  misc_feature (6285540)..(6285540): n is a, c, g, or t
  misc_feature (6285546)..(6285547): n is a, c, g, or t
  misc_feature (6285585)..(6285585): n is a, c, g, or t
  misc_feature (6285663)..(6285663): n is a, c, g, or t
  misc_feature (6285677)..(6285677): n is a, c, g, or t
  misc_feature (6285692)..(6285692): n is a, c, g, or t
  misc_feature (6285700)..(6285700): n is a, c, g, or t
  misc_feature (6285718)..(6285718): n is a, c, g, or t
  misc_feature (6285743)..(6285743): n is a, c, g, or t
  misc_feature (6285781)..(6285781): n is a, c, g, or t
  misc_feature (6291855)..(6291855): n is a, c, g, or t
  misc_feature (6291881)..(6291881): n is a, c, g, or t
  misc_feature (6292296)..(6292297): n is a, c, g, or t
  misc_feature (6292602)..(6292602): n is a, c, g, or t
  misc_feature (6292668)..(6292668): n is a, c, g, or t
  misc_feature (6292802)..(6292802): n is a, c, g, or t
  misc_feature (6292831)..(6292831): n is a, c, g, or t
  misc_feature (6292883)..(6292883): n is a, c, g, or t
gcatgcggcgcgtgtgtctaggaggctggggatacatcgggccgttgggcaggctgtggctgctgccaagagggacggctcacagctcgaggctccggttgatgaggtggatgcggccgtgcggcgacaatggaggacgtggtaagtggctactctgacctgactacctttgggaaggaatatatagatcccgtggacgggcgccggctgacatcgtttgttacaggctggcttggttcaggtacatccctcttctgggtcctgttgatatccgattggatacgagacacccacgtgaatgactgactcggtgcagcttcgattccttcctttcattcgggttcggtcgacctcaatccacccagttcgagtccgtcgacgaccaagctttcctcaaagcccgcctgtctcatccgctcccccgtccaggcactccagccagcttgtcgctatatggcgacgcatatattgcagcgacggctcgattggctcatgtcgctcgatcattcgtcttgtgggtagaggagcaagagccagttgggtctctggacggccagtctttgttgtcgatgttgtcgaatctaaacggaaagttggacgactggtgcaagctctgggtctggtccggtacgtctcttcctcccacctctgagtgttgtttcgcgtggtgactcggcacttgggaggggaaggatggcgggatatctgttgtggtatttggctgacgtgacaggatcgtcccatgccctttatctcggcgcgtcagcgcgtatagcccgactgcaggccgagcaccttcgcctgagcatcaatgccatggctctccgctcgtcgacccacagcgacggtcacgagagcagcgtcacataccttcgcaaagcgctcaacgcagcaaagagcacgatccaaacacatttcgaatcgagtcagaccgatctcgctctgagctttgctacggacgtgcgtttgcgctcttctctgcccacctcatctccctcctcctcaggctatcggcccctcatggcgtcgtgccttgccgtagtccgaataccatacaggctccttgctgagtgcgtgattatagtacatgaccatggcctttgcccaagctgcagtctttctgatccgcttgacaaaggcatcccccctcgtccagcaggtagtctcgctcgaccccgcggtcgtcagccattacctcaccatgtcggtcgacctgctcgaagtgggcgacatgtcggaaacgcgcttgtcgacctactttgcacggactatccgaggaatttcgcgtgccgcaggactcgctattcgtcctgacgattccacgactatagccggtgtggctggcgacggacgaggagatcagccttatgtacccgagcagtcaatgtcgctggtgagcgcggacggtataggcgacgccggactctacgacgccgaaacgttcggggcgggacatgatcccttcgacttgagctgcgtgctcggcctgtcgggtgttggtgtggcgcaggatacggagtggctcgacccggctctggggaacctgggacccttcacgcaacctacaacgcctttgaatatgatgtttggtaccggggaaggatctgtctaacgtcgggacccatatcggcggaccagtcctcttccgtgggttgtttgtattgcgacgctacaatacatacgtggacggtgcaatgtgcacgtggccgccgcggtggtacgtagtccccaaacccctcagactatttcccttcgtatctcaagtcgtgtaggacagccccggtgcacgatatccgctctcctataccgtaccaaatgtccgacctaagatgcagagcggcagcagcggtgtttcgcgcatctatacgcacgtcatgatgccagacattaacaaactgatcaacttaagaactgtccaaagtagtgttgaattgccgtcagaaactcgttatggtattaaacagtaaccagcgagtaataagaagatcctaatgttattaaatgagcttccttgctatctagcctcacggggtttccgccggtgtattcgtgtgcaaactgttaaagtttccgactatagaaattgagtttaggcgatgtgcaaaaaagagctctagtctactccagcgcagaagaacgcaaaagtgagtgaaagggatgaagggcggcgaagacgggtcgttttatgttggagggcattgaagggaggctaggtgacggcgtgttggggcgctaatcccaaaaaggcaaagctaactagaaaagcaattcacaggtcctctgtttacaacttgaaatcatgaatggaagtagccaacggataaaaaatcccttcgtggcatgccacacttaaaacggttcttcaatagttcagggagcgccctctttttcgtccgttgccctaggcccattactaagaaagactgcgctagatggttgccattgttattgaaatcgcgacggctttgtccaaactggaggaacggggacattgtgaagagagaaatagatcagcaaaaaataaaagtttctggaatgattcaatgttttccttgcaagactgagatgatcttaggattggaggggttgaaatagacatctttatactcgccgagcttggagaaacaggcatattataaacaagcgttgttgaaatatgatgttgtgtttatcgctcttactatgtgttctggggtgcacagctcggtagtcaaatacgttaactaactagtgaaaggggatttgaaccctgagcactatgggtctttgtaaccatatggttgtaccagatatatcctgctttctacaaaacacacttattttcctattcaatcttccacctataaggttgttacttccagagctcacagtaagactacacccccgtcataaatgctccagctctctccgaacaccgacgcgcctcttcgcgaaagttcatgatccagccgaccatcaaaacatcatgaggaacattctcttccacgaaaagctcaacggaggaagcgttctgtggcaactttccaaaagcatatgccagttcctgatgtgcctgacatagcacctctcgaccccccgtgacaatgagcacaggcgaaggcagaggaaatggatgtcgtataggagccacgaattgctcgattggctcggttatctccaagtcaccaagaaattgcttcgcaccccaggcagggaatgatgcgggaatacaatctgttttgtaattttggctttcgatccaggcatgagtgttgtgggcatttaagacattgcaccagggtgagaagacccagctgcactttggtgccggtagaagagatgggttgtcgtattgtacaatataccgtagcagtcctaagacgaggtcccccccacagctgtcgccactaagcaccaggcgtgatgatggaatatgcatagtatgaatcaagtagtaccaggctgaaataacatcttggagttgtgctgggaaccgccctctcgggtcaacagctaatcgatactgaagacaaaacacataagtggccggtgtgtgagataaaaggttgttcgctagaaagcgacaggaggctgttcggccgtcgcctagtacgtacgatccaccatgtaggtgcagtacgacataatcgccttcggggaccagagtttccggtgacaagcgttctgggtaccatgtccctcctattgtttctggcttaacctgttcgtctactgcaactccgatatatagctcgggctttgcaggctcaatcagaacaaattgtttgccttcgagattcggctttagagagagatggggtctcatgtgaagtgccgtgaacattcggagagacactttgagtgctgtattcgtcaaagcttgcctatacgtccatttctgatcttgtctatgcccgcgatgcagatacgcgaccgccaataggggcaggcgagaaatcgaagtgtccttctgggacgaggccatggaggatatcaagcaatgaaaaagtgctgtcacgaaagcgaagcgcagccttcttcaggtcctttgggacaccgttcgtctccacagaacctccaaatgctcttgtttcaactcatactggcaggtagtatgatgtaatttataatgatcaatcttggtcgttgacgtcttctgtgattgttccccactcggcctaggtcagccgccccctataggatagtgatttccttgtgcttctacataagccaatgagggcagcttatagaagtggctatcgtcacaacttatttaacccaataaaccaggaatcagttgatttgttttgaccccatttcgagttaccaaccgtttgtttcacaccttaaagaggtggatacagtcatcagttaaactgtagaaagacggtaaccatagtggtatataccatgcaggcaacccccactgtaattatcaacatatctcctcctttttcccaccaggtagtcgcgatacctttccaatgcagataagccggatacacaaaaattaaaggaacacatgaaatagatcccactaaagcaacaaacttatccaagtccctggcgcccagggctgcaaccaaggcgcagagaacgacaatacctgtcctgaaagtattctttttccactttatgaggagatcgcgctgaccagatttgcggccgaataactttctctccatgattcgcaaagcaggaaaaagctgcaccggggtgcccacgagaacagctagcgagaataataaccggacagaattgacgaatttatccgactgtgggaaattgctgatgatattgatctttgtctggctgccgaatgccccgtacgagagaatcccgagagtggcgaaaagaaaagttataagagccatgacaatgtagaggatgtgatcgaaccggtctggttgtgacatcgaagattgtatggggagaatcaggcctatcccttcgaacatgaatattgatgacccgatcgttagggtaaatgtgttggagtcgaagagcttgactgtgggctgcaatccccgctgagaaatttctgaaatatcgtagtagtatatgtagccaatagcgataaagatgaagacgtcagcaagtagtgcaactggtccgagtcgggagattttgcgaatgaaggcaagaggcacgatgatcactaactgcagcgcgatgattgtggaaatggacggtgtgttaatattataggtggccacgccctctatgaatgaacgtaggttattcgcggtgaacgcaatggcggcacacacgaaaccaagctgcgtagtcgcgatcgaaaggcgaataagtgagcgaagatgggagctggaaatagattccccaatatcgccgtatccaccaccataccgtcgctggcattgaagcagcaaatggaaagagatggttgtcaatatagagactgtgacgagagcaattgatgaaaagagcatgccaccgttgcggaacgccttggggaggaaaatgatccctgttcctataaaggccttgaggagcgtgaagaaagttttcatgtctgacgcgtccccttgtgagctctcacgaatgggaagcaatggccttatttccggctctacttcattccccgggattccagcactttcaacgtctgtctcatcttccgactcgatcaggtcttcgccggcgaatcttccgtataattctaagaactcaacgaagctattcggtgcatatttgttggcgaagtcacgtttgtttcgcctcaagaactgccggcgaaacgcccctggttcaccgtgtatcgtaatatcgagatcatcgtccgtttccagcctgggaggatgcgagaatgttgctgcgcgctgatccaatccggcccgtttcaagcgagcttcagtacgatagaggtcgcgatgtatatcgcctccttgcagttttagagaggactgttgaccatgtcctatgaatgtggatcgtcggttcccatcgtaatctgtagcttgtgtatcccgcacatcaccgtcatactcagtgatgccatcataagccccggtaaatcgcggatgtagatgcctagagataacctttcccgtattgtcggggtgttctggggctcgagtatccgccatcatatccctaaacctggtaccttttcctggacgcccctttatcactggcaattaagcgtgtatagtaagcatacatatgtacctaggtaggtacctaggtgcttatgagggtgcccggattactctgtcatgtgaccatagagctaatatgacttgacgtcataattaccccggacttattggccaaaaatatccgtatgatatagacggcaagatcacaaaagtttaggattcctgaattttttggtatttgaaaggtaggtaaactcataaagatacacaataggttgtattgtgtagtgtgaaaaccgtggagagggaaacaaggcagtaagactgtatacagatgtatagagacggtcaggtgactataggagacctccacaaattcgtacattgtcttttaggagtctataaataccattacacggttggcatgaccggaagggtattgtagggcggggagcttcatagccaggagtacagggctagccgacagaggtcatacgatacagtgaaggatgtagtatattgaaagcgttgaacgttctttttgatagcgattggctctggtgtacgtacactacatcccaccggtcagttacccatatatgtagatatactgagaatgctcaatttatcctcctacatgtgttgacccatacgttaagacggacgtgaactaagataacactttattgaataatttaaccgtttgcagtttttcagtgaaaaactgcaatgcttttcaatcatttaattatgtatgcgtctttcctatattgggcgtattgacggaccggacgtttatatgtgtcattgaaataatcacccataagctgtaattttatttgtcgtatcaattgaatgtaggtagtatgtaaggttaggtcagataggacagataggacagagatattcgagttatcttgacataggttggtttattttccgatctcacgtttcatatcccagtttgtgtgccttcatagaaggacttccatgaatagaacgtacggtacccgacttcaacctcagtgggccaacccctataaaatagttgcagaatcctataactgctcacttacaaagtagagtaatcaaaagccttgagattgacgggctaggagattcctctgcccaaggttcaaggcccataagatgcgatacagctatacgtgccgcgtgcacggcgtagctcacgtccacacaacttcgccccggagtctcgacaaaagatccaactaggcctacattggagatggatttgggggtaatgcaggcccggtcttcaagggatctcgtcaataaagttgagctcattcgtggcattgcccgtgggatgacaatagaacgctgtagggcttccattgccatatctccaggaagatccagatgatataggatctcggacatgacttctgcaccggagcaagagagcatggttttcttaacgtgatcaccttcaatttcgggcaggagcgcaaagccccagaggacacggacatcttgcggctgctgagggaaaacgggttgaacgggaaggcaaatacttagtccccagctgctatccttcataataatcattgcacccgcttgacaggggcattgtgacaaggattcgagacgatcgaaaaactccatgtcctcggttgttaccgtgaaagactccaatatagactcggacttgcgtgtgcaaaatgtgtaagggttgccaatgccctggtatttgtttccaacttctaaccatagtgaccaatttgcgtcgaggtgatcgcttgcttcaatagaatgccaaggcggggggtggtcgtttgttccaattgcgcatcccgaaacagttgaccccagcgtagcaagaacgaggtcactaggtcctagctttttctggaaatccagcccatgccgcgaaaggcttaattgggtgatcgcatactggttctgattgagggttgtctcgatatttcttattttggtgccgaattgaaaatccactccttgactctggagaaagaaatatatgggaaggtgtaatgactcgtattgatagtggccagtgatatccaggcagcttgagatactcaggctgcgaaaaccggataggtattgcctaattgcgcgtcgaaattctgcggcgctatgccagggctggaaaccaaacctatcaatttcgcaatttcacaaatcagacccaggatccagccgagtggactattcaattactcactgaattgaccagattgtccaaaaggtactctcaaaaaagcttctccggaaaaggtcccgtattgcgactccttgcagggttttctcccttttcataaggaggcgtactaggttaattcggtggttccagcttagattcaaagaatctgtgggcagatgcttgaagcgtccatctttctgagcgatgaaacaagtacgccctgttctgtcgatagcgagtcgtttctcctcttgttgaatgtcatctagaaatgattggccctccgccactgccgatggaatcgcatcaaggaactccttcagttcagagccaataggaacagggagacaagctgcaaactgatcgtatcctgcgtgggcactgccctgccgatgtattgtttcttgcaaggacaagtgctcgtcgaggatgtgcacagcagaaggacgtaatttagcatgtgttatcagataaacagccgatgctagagatgcggttccgcttccgagaacccaggcctctgtggcctctggggagcgttgattgcgtcgggaggatccgtccatcaagagtgtctaacaaggaatggaaataagacggtttgatacccgattgcggtaaagtgctcaaggcagcgagaaagaaaaagaaaatttcctttgcgaacacttggtcgtctaggatcattatattttatcaatcaccagaagcccatccgtggtggcgatacatgacgttgacagccttagccaacacgaagcctaacgctgtccgtcccatggagctactgtagcccccgatttatttgagccgtggttctacgaacccaagttgctcatcgggtaacgagcgaggagtctatatatctccatattccaaaagggtgacatgttgttcgtagttaaccgcaccatggtattccggacctagtagccgtggtatcggcgcaacaacaatactcttgaagcaaaagacaccagcccttggggtcgattagtggggttgtatccaacttttatggcatctgagaaatgctgatttaacatccttgacccgtcaatcggtaccgggtagatatcccacccaaagttcgttcaacgtcgatatcaagtttatttccttgctaccctaaccgatacctcatcttgaacgcccaacagcccttgtccacccacaaaacggtcgtatgcgtgtaagaaacatgattttgacctgtatttcggataggactttgattaagtcccgacggcaaagctacctaggtagacagcatttattttctatataacccactccagctaatcagttgttgtttaaactactttgtgtaaggcgcgtcttggctggcatttttcttgcttttatgacagacaagtcttttgggtaattgaagaaatctaaaatgttctgagacaaggaacccgggcgcggaaaacatagattctctggcaaatcactaacggagatattcatgcccgaaaccttccctaagactttcgaccgaaccaacacccggaagatccgggggtttccacgggcggtagaaataacgcatgcgtgatgacggctctgaaaaacaaaaagacgaacaaaaagacgtctcagggcacattgatagcggttgttgtacatcattggtgttattcagatgctggtgacactacagaaaaggaacgggaattaatggaggtgcaatctggatggagatggaatggatggagaaaacactgcgtcgattgacgatctcgcacgaggagaggaggaagagaagggaaggagagagagctatcatacatctaggttctatcacatggtaatgcctcaggcatccaacaggaatacagacgtgcaagcattgacgcggggatacgggagatgaccagctgtcgcctcccggcttggatagctcgctccttcagctgggagacaattagcccaacctcctgctgcgcgcatgcaccttgcggcacccacaggggaggaggacataatctactgcgcgccaagcacagtcggcatcagtgcccaggggacggagacagagctcggtcaggacaaaggaaagctcatgccactgattgttatttgtgaacatccaagtccaattgccaaggtctttctggttggtctctagcaaacatgtgtgacctgacaaatagggcatcaatcagatgaatgcctgcataacaaaactttcgaacattccgggtgaatccaatgcaaaccagtcgttttaatctaagtaattatttcgaggaccaatacaaatcacatgatgtaatatcaagcctaccacgatggaggtttggcgatctccagcgagggcgccagtgatgcttgttttggcttgaagagcctctccgatttcctctataacttcgctgcaggttccagtaaatgcttcatctcagagtttgggtactccacgttttgagacgagtcaggtcgctgtcgatcccatgcccacctttctatcagttcgggcgctaattctccctcaagcatctgcatgatgtacttgcccaggacggggaaaaacttgtatccatggaatgaaccacatgtggcaatgtacagtcccttggaggcagagtgaggcgagataataaagtccgaggtagtggtgaaagcgtccctggagagtgttaaaaaaaagccaatcgttgggtagtcagaggccactaaccagcaaatgcggtgtttcgtcatctcccatgtggcactttcaggtccataccacagattcctggactctacaatatcctgcttgaggggtcctggaaccttccactggttatagtcctgtgtgggtggaggagacgagatgtaatgtccagggaatacctctcgagtgtttgtgaaaatcttagatccccaccacttgagctcccggtctttagtaggaggaatgctgccaataaagggtttccctggagattattagtggggttcacgctaatataccaaaaagcgtaccttcatccggtgtgtaaccctggaagccaacaggcatgtccttgaacttttggtattgctcctcgttgagttgtgccattccggtggtaataccagccgcaacaattcgctctccagctcgtagcccagcgtttccgctcttcacggcactccactctagcaatgtcggcgtgaacgccccagcagcgacgacaacatgcgaggccgacaatgtgtctccagttcgtgtcttcacaccggtgcaagagccacgaccatcgaactcaaggttagtaacagatgcagtgatgtatgagactcccaattctaagcatctttttgttacagctcgaagggcatctccggcggctgcccaaccactagccctgttcacgagaacctccttaacaccggtgtaatcagcattgtcaaagactccaccataaagctttcttgcctcagcgacagggagggcaatgatatcatcgttgcgaccaagttccttgtggtttgtgatgacattttgcgcgtactcgctgcggcacgtccagtaaacgccagtttggtgaaagtgtggctgccaaagagggtcggatttgaaaatctcttgagcctcaagggcaagtctacagtagaccttgtcgtcgtaatcggcacgaataaccttgttccaatcccatgatgcggccacacgcgactcagcatcatatgcatctcggtcaaccagagttaccgacgcattgggatacttctgaatgaggtggtaggcggttgatacaccaaagacgcccgcgccaataatgaggtatgaggggtttcttgaggtcatttcgaaaatgaccctacaactttttttttgaagccgacgattcttggtagctagccaacgagatggcctttgcgaagattcagaaatgtcaatccacaaatttgtgaaatcgtatgtgcgagtcccagtgcttatttatcaataaatcaagagtcatcttgattcccatagacggtccgtatgcatcgggcgggggttccggtcgagccgatcacatgggttctaatgcctggatttctaaatttcgacatcaattggacaaattggaatgcagttcggtaaaatagccgatgccaagtatttaaatagataacggtcaaccaataagagaggatgtagtgtttcgatgtcggttcacggtccgtccacggtccgtatctggtctgtcggtctatactccgtacatatgttgtgtgtactttctgtctgagcctagctactccgtatattgcacatgattctagttcaccagaactcacttgctggcatccgagcccgctcttctcatgcgccatgtcaatcgttttcatctgatactatggaccctggccctcagcccaatattgcgtggaaatccccttgacacgattaacaaccccttcggctggtattgatatgatgtctaccaatcctcaccgtggggattcataaactatctagtctccttgtaactgccaggtgtacctatgccccgtgtacactcgcttagtcactgctgccatttgatctttttcccttttacctagaagctcagagaggcaagcaatacacaaattttaacccaaccttagaagtgtgaagggtagttacgccgtcaggtaaaagtcggaccgacttataaggcatagagccctaatctatcaatctctctttagatccgtcgcagcctctcgctcaaatcattcgggccactgaatttatcatcgtcaccattatttacaggcgaattggtgtgccacctggtatggtatcccatccaaattccgtataggtgtagttctgcatggtacctcataaagttgctaccagggcggccgtggtgaggctgattgcacaagacttgaatgaacagcaatcgagtgattgtgaccgatatgctccgagatggagtcactagaaggatttatagcctcgttgagaccgacggtgatgtagttagttagtccgatttcatcgtcattggcactcttcttcatgttatcaaccccgtaatcaaacattggcgctcgattgttgtcgtatcctttttttcaaactacaccccgaaccattgtgcaaccctcctcttgctgaagaaatgccgatggtcctctgtgaatgaaatctcgataatattgatcgatgggcgagtcgagcaagcggtgcaagatggggcagacatgcacaaaccaccgcgaccgatggttcgattgttgaccagatgaatacgggtcccatcatccaagtcacgtctgtggcgctcataaactcagagagataacggattcgcacgatgctggcaacaaaaacactgcaatgaatagttcagtcccattcacgaaatgaagctcagaaagatgatgccaacatacaagattcccacggccataatgccacaaattgctaatttcttccgcagggttatttggaactgagctattcgcggaaacggggtgactaggatgatgaaatcattcagcatgttgaggatccctaatgcgagaaagaattggttgacgtcgatgcattttccctcagtgccactgaattgtgtccaatggtttgcaggaattgcccatagttatccaaaagatgataggatatgagagtgtgaggaatgatccgcaaacaagagccactttcaaccactgctgcagaggggaaaagactctcgcatagaatgagagaatggacagcctggtgcaagtgcacgacgaggcataaatgaacgtgcaggagaataggagctagttaaataaatttggattagaagattgcagctgcttccaggggaatttgtttactctgtacaagtccatcagttcttcgagtttgactgcccaaatatgttttcctgcaccggtagctccgcctgggggtatcgttgctccgttaaataatggtctgttactcggtgtttcagtgctcacccgcgatacttattccagtcgtagcacctatacaaagcttcgagcaaataaaaccagtaaatgtgatccaaactggctaagaattaacttactagtaccgcgataattgcccagtcatccgccatcagggcatttcggaggacaattcgagcggtaaatcgtgtcaccaatacagtagccaggctgagcattgcaataaccacgccattgttaacagatacatcactggcagtgaggtcgatatctgaaggggctggcccaaagagagcgagaatgctcgagtcctcattcatagcaatatgaagcgagggttctcacggcattgaaccgaagcacatagcaggatcagatgtcagacctgcgaactggatggaataattactgtctccatccacgggtcatggatgctcccaatcagaaaagatcgcaacaaaatccgatggcccctgaaccccgtacaacataagtacgttccaaaggacacatcctaccttatggagataatacaccggacgtcaagaccagattaggcttagttcacagactaaggccatgacaggcggtcgacgtcggccaaagaagccccgatcctgtcaaaagaaaacttgttgtaattaagaaacaggctttatgtggggagatcaccggaggtgacgcctcatccaaataaacagcgcgttgtagccctaccaggattgctaagccctggagccaaggtctgtagcactactccgtatgcatgtcaaccggcgatttaccaatgccaacaaaaactacatatgtatttgtcttataattcaccaattctgtcattggggcttccccagggctacatatgtgttccaaaacaattagaaagcacatcagaccaaatggagtacctaggtgcaatactgtatattgccccaatatggccattcgcgctatattttagtgaaattgcgacgtcgcgcctcgcatggccctagtcaagcatcttcgtccttcaacagaagttgaaactggcggcagtatctcccagcaatggtcattaggccccctttcagttcgcttaaactttccacaatgtgtattgttcaagcggagccttttagttggcccaataataagaaatcgttaactattccagtctatatacccgccctttatccctctcgtggtctaacaattaatgctcctctttggcataccctctttaacccgacatatataacacggctcctattatgaatgaacgaccgattcataagctcacagctttggagcgtatcggcccaaagggctatcttcgttatatcttcccctttcagctccaagaggagtatgacttggatgaagttatttgggttctccaagccggatatcaagcgctcacacaactgatcccagaggtcgcgtgccaagctgtccccgatggcagttcaaaacaaaagggtgttatgagacttcggcaacaggcgaatggcgacgtagctcgcatcgtggtcaaggacctatgagcgtccttcgaatctgagtatgcggagttgaaagagaaatccttccccgtcacgtccttcgacgctgacactttctgtccccgttctgtttggccttcagctgaagagcgattaccaatttcagttgtacaggccaatttcatccacggagggttgatcctgacatggtgcatccttcacatggtgggcgatggcacaactttctatgcttggacaaacatctgggcagaggagtgccgccgggcacagggactcgagatcctggatcccatacaactcccacaggccatttggcaagaccggaaacaagtgacaaagccatccgggcataatgctggaaaactcgaagaccatccagagtatagacttcttcctttcacgccgcagggagccccgtcaaagatgacttccttgagccatcgcggtcaggttttctatttttccccggaatccgctgaaggtcgaggcgtccaccatgaacgcgacggagccgaccgatcaaaaatggatctcgaccaatgatgctcttgcagcgctactctggcgtacagtaatggcagtacagtcgcccctcgagactctggaaggtgaccctgtgacatttttcaacattgctattgacgggcgacaacggacagatcccgagttgcatccagtgactttaggatgtttcctagaatatgtttcagtctctgcctctatccgcaaaatgtttagtacaatgaatttggccgacctggctacggaaatccgcaaggcgattctaagggctgacggacggttcacggatgatgtggtagctcttgtggagcagcttgaagacgtcgaccggctggtacctaccgcctttctggatcttcccggcttcaactgcgtgctaacctcatgggtgaacttcgaactgtacgggttggagtggggaccactgctgggcaacaagatcgaggctgtacgagtgccacatgtcggttgcatcaacggctgtcaagttgtgcttccagttttgccgaatggtggcatagagattctggttggtgtggaagaaagttgtttggaccggctgctggatgaccctttgttcacgaaatatggcgttgctcgataagaccttcatgaatgcgagtgatttgacagccaattgtagaaggatcactcggtgagctcgtgacgtagtaattggatgggacatacgatatgcgccatgtaaatgacaatccacttgatccacgcatgccgtgccgtcaattcgacaaggtcgatcttgccaggcaggaagaccaagaagcctgtctgcccaggtgcttccgattccgcgtagagattcgtgtactggaaagtgatcgcgtcgaccgaatgaatggctttggtgtgcaatgagattatggcttttagtatccagccctgggaagcaatagaaaaggagaaaagaatagaggttgcctcgggcaaattgtttgtgtcaacctgaggcatgaacagaaaaatatatttgtcaccgggtcctttccccggggccccggggccccggggccgaatacgcgacatgtgctttcaacgatagtataagaaagggaaaaacaagaaacaagaaaaccaacacgatgatcaaaatgctctggaatcccactaacagtacagtcatcttttgcttcccatctgagaacctcattgaacaccaccaccttttcctcttcttacgaattctctcagcacattgccagtcattgtagctacattgttactataatcgtcccacccgagactgcagtaccagttgatactgccaacggaaaataccgcgccacctcccgcggtgtcataatatactaggtcactcctgaccatgtcacaattggaacccagagtgttcaccatggggaacatcgagtcctcattgaaaagtccaaagctatcatcatgctgttggcttctggctagtaggaccgtattggatggtgtcccaagcgcataatccaggcgatcgatctcgtcaccgctggcgccgccgccgaagccattttcgccaatcggctcagttgggtccatacccttaaaaatccaactgaactgggcatcctgcacatatcgcaaatctgccgtgtaaggctttccctttccagcgccgaacgcacagggcccaatgccccagaggtagttgggagcacgaccgcggctgcgccatagccctccaagagatccggtgagactgtgcattcgttccccagcagggaacgtaacggaccgacaaccctgatcgcccttccgaacttcaaggcgatgaggctgttcattgacaacatcggctacccagtagaacccgttgccgcccaaatacatcatattaccccccgattttgcaaatgcgctgaaggcgtcgagagaaccaagagagtggtactctggatgacagccggtgatgatggtcgtgtattgcgaggttgcttctcgacctctgctgctcaagcaatgatcggtgataatgtcatagggaattccggaacgttccaggaagcccaccatgagaaggtcagcactgaattcgcggggccggtccaaggcccagtgtacatatcctggtcggagattgagtatcggtcggcgagcactggagtatgcacagggggagccgtctgtgtgaacatcgtaggcggagagacccaaatccggtcgccgggcaaggtttttgtaatactcgtttccctgtccgatgctaactccatccggagttgtcatggctgatgatttggtctcatcaaacattcgttcatttgcatacgcgaggtatgtgaatgtcgtgagaaccaaagccacttgtgccgttgagctaggacccggtcgaacgaagaatgtgaccatgtcgcttgttccatctgagcacttgacttcaacggcatacgcgccggagcgagctgtcgatgggatggtaacggagaagttcgttgcccactttgcatcatccaggtcatcctcgtggaaatgaatcgcaccatatccgtacgaggctttggtccagtctggctgagtgccatcccagtcaaatcctttgaccgcacgtgtgggtgcattgaccaacacaccatgtcgaccgtttccagaaacatcagcgatagagtcgctaggtatatctttggagaagtcatactgcgcgagagtacgccttgatgagcccgccatggtaaaggagggagagtcgattcggccattgtaaaagcatgatggtttagagctctggtgtccaatgtctttgaacatgcctgcaccaaacagcaacgaattcgaccccaaaatcatgggtgccaacatggcagtagtcatggtctcgccattcggggcgatttcggctaggcggttcaactgacggatgttcgaagtgaatgtgttgttaaggacactgagacggatttggagccaccgccagcgattcacgacgagttggctctggataacctgaatcctattcccggtgccgatgaagaactcaatgtttgagttcctcaaaacgacggcgaaaccagttcgagaagatatgtcgagacaggatataagggtttgacaatagtagttgacatcaagcaagtatggttggacatgaaactcgacttcgatgccctccttcactgtgggtgtcacctccgcccaggatgggataagagcgtatgagccggggcaagcatcttgatagcgaccatcctcgtggtggccaaccggtacctcggtgatatcctccagcacaacggggggagcatgaggaccgctgtacccctggacaagacgtactaggcggtgatcgtatcctttttcggaacttgaaacctgaaatgggttagcgtatgagatgtaccagggtacgggtgcaaataacctactttgatgtcaactgggtctcccggggagacaatccagggttcggcataaccgatgatctgggtgtcttgattgtcttggttgggaggcatttctgtaaaatcgattcaaattttcttaacgttggctgtgcgttagtccgggtaggtgtaggtgacccttactgggttaaggtaaaagaggggttagatggttcctagtcagacttggaaaagagagctgagattctaggcagttggtctgtccacattagtagataaagccaagctctaaagctatatagctgtagccaggatatatgctcaccagacttccaggattggtaacagaacaatttgccacatttggaatgagagcagagatgagccacttatatatcctcacccactgaaataaatgaacctattggctagagacagagttatacttctgacaatgacaagcttcctcccgatatccgatcggctggtcccagagaggagggggctttccaccaagctctatggattaaacgcgtggtgcaccatctattcatagcaatccggtcggaaagccgagctggtccacaccaatcgcctatgcgaagattcggaggtacctgcccacatccatgtacatatatgtatgtaacttggagggtactttcttcctgcttatcccctgcacatgtgtccaccacatccgcttatcaacctcgcttaggggcttgccatctaatgttacgccacaggccaaatttgaatttcctcttttacatgtattccttggatctgaaaaacttaaataaatcccagtcaataccaaaatagccaattgaatccattgaccaagataccttatctacctaggtagaatgtgaagtcttgaggtgacgaattctgatcggagaaaggagtgtaaccttgtgtaatcgaggcgagaatttccgaatgtcgataggataccaattacttgaaattcgaagattataagattacaacattaccaccttcggtaggagaggccagtgtattacctaggtatacgctaagtacccggtcccactactggggaaacaagattacagtttaccccggactctacgtgatcggcaatggagaagtgattggtcgtttaattaaatcccccggcatcgtgttatcagggcagagcagggtagagctcatgatcgttctctggtgaactttataagaccctgacagcatctcctcaaaggagtttctcctgcaagacttctcactccagttctatattgcccacaaaagagttggggttcgctcataatggaaaatcaagatattgaatctcttgcggactcaaagtctacacacgcaaagaccgacttagacaagtcagccccaggtatggtggaagaaggtgtgatggtcactctcacaaatgaagaggtatgtccaactcgataatctctggcgaaagagaacttcctaacccctttagaacattcgaatcagaagaaagacagacaaaacgattttgacgattcttacctgggtatacttcttacaagtgagagtgtaagaaatcaatcatatgtcctatacgatgctgatcagctgcctgttaggtcttggacaagggcgtcctgggaacggcctccattttcaatctgcaggaggacacgggtctcgtgggtagccagtattctctagtctcgtccattgccccgattgcgcagttagcgtggcagccattctcggcatggctcattgtgaaggtcccgccccgtattctgatgccatctatggtcctcggttggggggttgcagcagcaagtacggccgcgtgcaacagctttgcgggattggtcactgttcgtttcttcctgggcctatttgaagctggatgtatgcctctctttaccatcctcactggccaatggtatcgtcgtgtcgagcaaccacttcgagtttcgatttggtattccatgaacggaacagccactatggtagcttctgctttatcgtacggccttggtcatatcccttcagatgcgttgaagccatggcaaacgtaagtcaccatacgtcatgacatctgaatgtccctaattgtcacgcagaatcttccttgttgttggattgattactattgtcagcgcgcccgtggtttattggaaactcgacaacgacatcacatctgcccgctttctcactgagcacgaacggcaacaaggcgtggaacgtctccgtgcgaataaaactggcgcttcctcttacaactttgactggtctcatgttcttgaggttgccctagaacctaagagttggctttgggttgtcatggcgttgcttccaaacatgggatcggcgatgacaagcactttcggccctcttattgtcaagggttttggatttgacgcataccaaacttcactgcttaacatacccttcggtgccgtgcaaacggttgtcatcgtcgctagttgttgggcctcctacaagttgaagctgaaatccgccgttttagccggcttcatgctccctgtagtggcgggcatcggaatgctttacgggctcaggcatgacgaccaatccaaccagggaccactactgctggcatattatctatgtgcatttttgttttctgccaatcccctacttctgtcatgggtcgtgggaaacactgctggtgccgccaagacgtccaccacgatggcactttatcaggttggtacatccgcgggggctctcgctggccccctcctatttaccgcagagcaatctccatcatatcttcccggtataagggccattcttgggctcttcattgctttggttggctgtgtggcgctccaagttctcaatctagccttcttgaataggcagcacagcaaacggagagtcagcaatggaaagtccgcggaggtccaggacagatctatgacaaatgcgtttgaagcagacggcaaagtgcaggttccactgtccgatgaagctgcaccattcctagacttgaccgaccggaagaatgacgagtttgtgtatatttattgagtggaagactcgctggaagctctgtgagggcagtaccacactcttttcgtgttcttgtacaattgaagatgcaagactagcctaagaatcttgatacttaaacacgatatatcccatgttaaaaatttctgatgtgacaaaatcctttctcttgtgcaaaaggatgacatagaacccagtgcaagcaactatcgcagactcgtttgtcccattaaaagccctgctcatgaaatgtgaagtcgtgtcaaacccttgaccttcaaaatttataactgggatatacttttttcttgcttccaaacagcttgacagtccatggatggagtctatcttacatgtgaatcgggaatcgcgaaaaggcacgtctgtagtacgcaatgatcaggcagatacatgtatgtagttacagttggtcaattacaagtatggtagcaatatttgcaactagaaatatgaaattctattccttagaaatggccctcaacctcgacaggggtgtatacctcctccaggtatttctcttcttcggctgtgagctctttaccgcgtgcggataaagcatcctcaatcctcgcgacgctgctaaagccaatgataggagtcgtcactcgcttcagctgccaggccagtgtaacttgagacatagtccactgcttgcgctttgctagctcgtccacccggttgatgatttccatagattcagggcgcaggcttgaaggcgtttcattgccaccagcggacctggtagtggttcctcgaatgttcaagggacgagcaagttgcccttctgcaagtgggccccactgatggaaaaagaaaaaaaggcaaaactgtcagccaaagaaattgtagatagttactatagcaagggtcttcttaccgggacaacagccacacccgttgcattgcaatatttgatcatctcacgttcttcttcacggtacagcagattgtaacgattcttttcccgcgttagcaatccagagaatatagtcggggggggggggtcagactcggtacgtacttgcatcgcaatgaattttgtcaatccgttcttctccgcgtatgcctgcatcatggcaaattggtacgcccacattgacgaggctccgaggtaccggatctttcctgcaatgaccaggtcatgaagagcgtgcatagtctcttcaattggtgtgtcgggatcaaagcgatggatccagaagacatcaatgtagtctgtctccagacgtttgagggaatcattcagtgcggtgaagattgccgatcgtgagaggccttttaaccgcagttagtgactgtgcctacctcgcaaatgcagttgctgtggctcaccaaactggttcacatagtctttggttttcttcagatcctcaatgatggggtatgcatgaaactgctgctctccgacgcagctgtacgccttcgtcatcagcaccaatttgtgccgcgggatctcatattccttgatcgcttgggcaataactctctccgagtcaccgttggaataaatgtttgcagtatcccactaggtacagtcagttttcagttttcagcaaaagtgagataggggcacaaacagtgttgactcctcgatcataggctgccttcaggagtgggagggccttttcgggaccaatgacccagtttgcccattcagggtttccaatgctcatacatccgacgatgggaacggatacacggaggccgctgtttcccaggcgtctatactcgactttggtctccgccaaggattttgcgactccttctgggagaggtgccatgatgatcggggttgaatatttttggggattgaatttccagtttctagtttagcttaggatttcgacttactccctccccatatgctttttataattcttaatggatgttcaccatagcatgcatttacggcattctacccgcggagaacattccgatggtcgggtcggttctaggggatggagttggggagacaagattggggccgatgaaaccgagagagccgatgtgggttgcctattacaggaaaagccgctcgcctacccaaaaaggaaatgttgttcgtctcaaataggtaggtagatagaggatttctgctttggggaaagacgcggggtagtcacctgtttatattggactattgggtatgtgctatcagcctacatatacacggtggactgtttaatctataactaatctataccgcgcagtagtatggactagtgttgttttagtacctgttagctgtcagattaattctccccaactttagtttcctgatgaacctatccgcttctaaactacctaggtaatggactagcgggactaaacattccatctcggctttgacagatttccccgcaaaaccctatctcggtattacttatctaaccgtaaacaagtacctacctaggtaggtacctacctacctacatatgtagctactagtagtagttcgaagtacctattaataatattttcaatcaagttcctacatctactgttacagcagagtagcagtgtactagtgtaatggtagtgtcgcagtatcgcattgaatacaacatcttcaggaatcggcttagcgtctccatattagtgaacataagaaatattcgtcaactctcggcatgaggggtccttgtatcgtgaaactgattggataggccaataataacgataccgcggtggtgacatagtggaatggtggaggttgaatacttttgtcattttgccattggagcggagatggtgaccctgggatggtagcgtaggtctttagtctccctttcctttttccctcactttctcgtagtctcccaaaagctaagaacaatgagtcctccacctctcgtcgctcgtgaagacactcgccgtcgcccatatggtcctcggtcgcgaaacggctgtctgacgtgtaaacgtcgcaaggttagatgcaatgaacgcaggcctctatgttatcattgccagcgtctgaacctggagtgtgattggaaagtcaacgagccacaacgacacccctccttgcagaatgacccggtttctctcaagtcaaacgtcgcattggaggtcaatcagctatctccttcgcctttcctctttgactttcaccccatgccagctccgacagaggggtttcacatgttccaaaacgtctatttcccggacttcggtgattttacggccttggggaatacttaccagcaggcacgatctagcgacgcagattccccgagttcgtctctccctccgcgacagtcatcacaacactccccagtcgccaatccagaagtccaaacctcgctacatttacacctgccaccaattcttgatccggtagagaatggccccagatgtgcttctgcgcgggaactgctcgaaaacatggcaacctcttcccagatgctccgctcttcgatcgccgccttcgaagccatacagtccggaagtggaggagggccagcaggttaccagcaacactacgagaatgctgcgacggagttatcacaaagattcggagaatctgcgggggacgtcataataagcgataatgaactcagatacgttctggccactatctttttccttacgtacataaatgtccgtttaattgcctccgcgccaatgtactgtttattttggttgacttggtatccagtttcttacttcacggctggaccttgcctatttgaaccttgcaaaggcccataatgcgctgcaagcatcacagaggagtggcttgggctccacaggtgtgtggaggaactcactaactcaatagtcctcttgctaacatccgctgtattagagctacgcatcatctcttggattcgtttgttagacgcccgcgcggcatcggctggtggggaaggagtcctggtcaatgacacatctggaatctatacctcgccccaaggttcgagctacccgagctcaactccgcaaagcataggctccgcctccaaccccggagcgcacgaggtgatctatgatttgttatgccagccggggataactttctttcaggaagtccagacgatcaccggtcgtatcaccagaatcgctcataatcaccgcagccgagggagtgtggaggacgagactgaggtgatggctatcgccgctgatattttggcggacctgtcatccttgtatgataggagaccaccactcacggaccatgctgtagctggaaatattggcagtgatactctggccgagccgctcgcgtccactattgtccgctcattccagacgtatcttgctaacttttacgcctgctacattcacctccatcgagttgcacaccgtcatttagttcgttcaaaagcagcagtgacagcgctgtgcaaaatcaaggagatagtgcatcgcatggtcaacaataatgaatctataccggtcaacatgttatggccattatttctatggggtactgaagaggatgactctgacgaattccaatggatccttcagaccattcgcggtcttcagcatgtcttcaccaacgcgaacatgacggccgacgtactccaggagacccaaaggagacagcgcgaggggggcaagcgcgtcgacattcgctctgtgtgtctggagttattttataccactttcgctattgtttgaaccttgtcgggtactatgtatgtcatttcagagggaaatggtgattttgcgattttgttttccattctttctattgcctagcctacgtctttatgtataatgtctgatttgaatctacaccttcttcgacttcagttcctcctcaactgggagaaggggcgcgaccaaccggacgacacagtcttgcttttccgtctctgcaaacttggggaacggtcgacggcaatgtgcactggacaagggataaccgcgctccttggcgataatccatttcattccgttgacatctgatgttccgattccccactcaggctggaccagtttcttctgcagtgcagtagcctctgcgacctttccagccatgaacaaatcataaatttcaaccatgacctgccaaatatattaatggttggtacttgttgccgtggacaaggtgtgctcttaccctcgggaaaatatttgcaacgcctgaaatgcaacctgtacttccagcggcgaatgcggccacaagccagtcactcataccaggtaaactggtgaactgactcggttcaaaccgtgcagctactctggtagcctttccaactcctccacaggtcaatttgaccgcggcgatattggggtgggcggcaagtttttccagcatatccgagttaacatctaatccggataaaaggttggggaaattgtagatgacgatcggaatcggtgcacggtcggccacttcttcgaaaaagtcggtaatggctttttgggtcatcgcccaatggaacacagatggtaccaagaccagggtaaaatcggccccgttcttgtaggcggtctcaatctggaccaagatgtcgcgggtggagccagccaaacagcccatagtgacagtgaaatcagtctttccatgggcatcagcgatctcccgggctctcttgactaacatacccttctcttccacactcagagtagctgattcaccactggagccggcgagcacaactgtcatttggtcagctctactttgtaaatctgtaccaatgagacctaccgccatgcatcccagaagtgatcatatactctaggtgacgttcctgagttgcccagtcaatatcctgctgctgatcatcttcaaagaaggtaaccgaagggccgtggattcctggtgggaagggcttgtttgtctttgtactgctggaagccatagctgaagaatagatgaatttctatgttgcgaataatagtagtttccaatactacaaatttggagagtcattaagtactaaaatgtttggatatccccacctagcgtggggattgggtcagtgctatttgacccgatcgcgtcgcaaatgcaacccgatcggatcggagtccggtcttcgcggtcgtattcagacatctagcggggccatcaatagcgcgtggtaacgcatgacactgcgtggcgtcgcatgtctgattcagtggttcgcttcagttcttcaacgttgcggtcaatgagattgtggtaacgcagtcagcatacagatcctgtgaagctaaaccagcagagccagtgggaccagtgggaccagtggataccttccactccccagggtctgcattttccggggaaaccgacgtaagccaaggaactcaaaattggtatgtactatctatcctctacccgtcaatacatactatgtgttattggatttccctctatcaaatcgaatagactgcatagattgcagtcctttcctttcgtcagattatccagattatccagatcagtcccgaaagtgaaactgaatccaatcttcgatataaatagctccttgttcctccaaaaaaacaagagtcatcatctcagttagctgtttccacacttcctctttcactcaaaagcccgctttttcaggtcaattttagtggactaacttcacgatgctatcttcattgatgtatttggcacgtgagtgctccatcttgcgcgctatctccttatgtgccatcctcgccgtggcaactcctgcggcgagcgcaagcgtcacagcaaagcacacgctggccacaaatggaaaggggctgtttccacagtaccgaattgttgccttggcaagtctgggaaatggtgttctcctggcctcatatgatgggcgcccagatggaggagattcgccatccccaaattcaattctacaacgacgcagtacggacggtgggaagacttggggcaacccaacatatattgcgcgaggtcaaccagcgtcgtcgacactccaacagtacggctttagtgacccaagctacgtggtcgactccggtactggaaaggtctttaatttccatgtcttctcgaagaaccagggatttctcaatagcgaaattggaaatgacgacaccgacttaaacatagtcagcgctgaagtctccgtttcgactgatggaggacttagctggaccactgatccagaccatgaatcctctttgcctcccgttgcatctgccgacgttggtgcaccgccactcattacgaaagcaatcaagcccgtgggtagtacttccaacggggtagccaacgtcggtggaattactgggatgtttgcctcatccggagaggggattcaactcaaatacggcaaacacgccgggcgcctggttcaacaattccttgggaaagtcatccaatcagacggttcaaaggtctcgcaagcctacagtgtctacagtgacgacggtggcgctatatggaagatggggaaagtcattggcactgggatggatgagaacaaagttgtggagctatcaaacggcaacttgatgcttaactcacgcccgagcgatggtagcggatatcgaaaggtggcaacctcaaccgatggtggtgaaacttggtcaacaccagcaagcgaaacccaactccctgacccaggaaataacggagcaattaccaggatgtatcctgatgcggcacatggttcggccaatgccaagatcctcctgtttaccaatgcaaacagtaaaacaagccgaagcaatggtacaatccgctattcctgtgacgacggaaagacctggtcttctggcgcagtgttccagtctggctcgatgtcctattccactgtcaccgcactcggcgatgacaggttcggaatattttacgagggggatagcaacgacctcgtctacattgaagtttccaaggattttattggggtttcctgctgataaaactcccattggcagtgtgctctacttgggaacttggtttttacattgtacctaggtctatgtgtacatgtatgtactacagcgtcatctcaaatattcttttgggaaaggacctgacaatggcggcagcatgatggattttgtggctcggccatttattgacgatggcacacgatagctatcgaactcactggtagctattgcgaatgttcagtacaggtggcgttggttcctctagtcacgcctggatgaaatcagaccgttatagtgacaccttcctatgacactatattctgtattgtgaacccaatatttccatggtagtagtttcaggtgacagcaagggcaaaaattcttattgctcaaaagtaacattgcatgtagagatcccatagtcaaggtggcgtttgagagatttataggtggtaaaatcatgctatttttaggcttaggaacaatgctcgcaagacgaacgaacgatgtagtaggttggattagagcccagtaagaatggaattcctatcacaagcactatccaaacaataattgtgtagtttcctgtccatcgccagagctaggtctcgtcttgctatcaatcacggcaccccaccattttcctgtggcccaaatttcatcgaaaagcaccggaacagaattaaacatgctgtaacgagacttctcgccccagtaagcacagtatttcttcacaaaatggcgcatatcttcatctgtggtttcactgcctgcgaggaagaccgggataaggagttgcttttgtgtctgggatgttcgtcggcagctccgaatgtggtcaattgtcttgcgcaccagtctgtgaacactgatagatcgtcttttgcgatcactcttgaagatatattcaagatataggagcaatgcatatcgccaggcctccgcacagtggtagcgatcttgtcgctcgtggagttgccttattgcctcttcttcacccaacgtggggtcatcgtcacttgatggaggatctatgtcattcttccacccaatcagttcatgttctatctttgtaacaggagtcatgttgaaagtcagccatttcatggataagccgatctcgcactgcttggctaactcggcaagttggaacaggtgaaccagcaattctcggggacacccagtcagattgaagaaagaccattcatcttgtttttcccatcgcaccaaaaagtccaagtatgcctggtccatgataggactctgtcgagatatcaaggcaagtgtcgcgtcccaccttggtttgatcagcaacacaactctcagaggtaagaggcttcaggttattaccatgttagcattgcgacttgtgaccgaatgcgaggtgtcgtcaatgcacttgggccgccatgggtttggagcactgagtgcgcccgcatcaagtgagttgaccaattcccgctagcggagagggtgcactagagccgtgtattagcgttcagccacatgtatcaccaaggtgaatgacttgcatcaagagtaaaaaggattagtataggctccaataagctcagcactggccgactttgtaatgcacattcaagtaactgaatagctttccggcgatgttcagcggcttcacttggccagctaccagccaagcgccctagatgctgacagcatagtgctagaatggaatgaaaaagaaggcgggagcgttggggcgtctgacgtttgcagcgaaatggattcactgtcccaggtatgtcccctgtcagaggtagaacgcagaattcggagtcatctatggtatcgtaagcgtgccctctcatcgccaaacgtggaggccagcggaagtctcacataaatcaagaagcttttcatggtcgttagatgagatctcggatatcataggaacagcttgaagacccgctgaagaataagggattgtgggttcttgaaaagttcgtggaaccagatcagctggagcactttgctcttcttcatctcgaaacatggggtcgacattcactgggcaggtttgtagattttgtaacgccggttcaatgggcctgtccgctgaagagagaggtgtcattctgggtgtctccattacacccgacacttctgctgtcagcgtcttctgaggctcgatatccaagaagggggtggacgcaaaaatgttaggaagtatggagtcaaataaactaaaatcgtcaaaaagatgtccgtcttgtagttctagaaaagaaaccgtgagaaagatgtatctcttaaacattgcaagggcaaggaaaactcaacgtacctagaccagataggccattgccctgttggagatcatcaaatatgtccaggttctgcgctgtcgttcttaacacaacctcaggggtaaccgacgaggtttctgttgcaactgattgctcctttggtgagttggcttttcgacgcttctttggtttagagacacctttgacaaagcgaaagcgtttaggtgaatctgatgtggtaaatgcggtggggacagcgttggggaaggagctggtgacgatctccccattaggtaggtctctggatgcaccagctaccgaaggattatttgaccacattcgcctagggtcccatgagagaggcattacaaagccaccacatctgcgaccttgaccgagacatgttgaacatcgcggtcgacgccggtcgcacttttcacctaaagaagcacaagtatgacaatctgattgggcaaacccaagtgaattggttctctttccttgatcagaaatcatcacgtcagatggtggaagatacatatctctttttgccgtgttgtagaggagaaggtcccgctctccttctgaaatggggaatcaatcggggcaggtgacatttccgcaggattgagcggaatttctgtcaactctctctatacccactgtcccgctaatagatattatgggttaggtatggagcaaattatagaatcttgaattgactgaacgtggttgagttacggcatgtaattcgcaccggcccatggtgatgcgtattcaatatcatagttgccaggcatatatttcgttttgaccagactgaaaccccctacatgtaaatatttgcaaactaacgctcagcaatgatgtcacctgacggggtcaagtaccccacacccctccttcccgatcgggaaatatcgtcattaccaaatcgggaaggcgagccctggagacactgaagagccccgccacttgcccgattgagccttatagtatcatccatggatggatatcacctccagggctatttcctttcatggaaattgcgatgtgtcgaggcgtaggcacttaaaaggtctttatatctgcctgagtatcttgatttattcacattctcctcaagcaattctcctgatcaaaccccaataatacaaaacctccatcaccatggctacaatggaaaaaatcttcgccgcctaccacgagcgccaaaagcttcttgcagcgaacacccaccccttcgcaaaaggtgtcgcttgggtggagggagaacttactcctctccatgaagcccgtatcccaatcctagaccaaggcttcatgcacagcgacttgacatacgatgttccctctgtctgggatggacgctttttccggctcgatgaccacatcacccggttggaagccagctgcaccaagctacgcatgaaactccccctcccacgcgacgaggtgaagcagattctggtcgatatggttgcaaagagtggcatccgcgacgcgtttgtcgaaatcatcgtgacgcgtggattgaaaggtgtgcgaggctctcgccctgaggatatcgtcaaccgtatctatatgtttattcaaccctacgtctggtgtatggaacctgaggtgcagcctgtgggtggaagcgcaattatcgcaaggactgtccgccgcgtcccgcctggctgcatcgaccccactgtcaagaatctgcaatggggtgatctggttcgcggccttttcgaggcttctgatcgtggcgccgaatatcccttcctgaccgatggtgacaccaacctcaccgaaggttccggcttcaacattgttctcgtgaaggacaatattctgtacactccagctcgcggagtacttgaaggtgtgacacgcaagagtgtgattgatgtcgctcgagccagcggctttgacattaaggtcgagttggtacctgtccaaatggcttatgatgcggatgaaatttttatgtgtaccactgctggaggtatcatgcccatcaccagtcttgatggcaagcccgtgaacgacggaaaggttgggtctgttaccaagaagatctgggatgggtactgggctatccactatgatcctgcctacagcttcgagattgcctattagacaccgagttcacgaagggagccgagcgcggcgaaaaaaagaaagaggctgacgcttgcgaaatcgaaaataccaaatgaatgaggcttacggtgataatagccccttgttccctaatttcagatttgccccatacagggggattgtatcagtctcatctgcaagatatctaaagtactatacaagatacagatacgtctttttttcggatatcaaatcctcgggaagtcattgatagatcttaaccatggttcacatccgtctacccctcaacccaatctccagtgtccatatactacgatagcttctcttgcaagatagtatagatagtaagcgtcttcttagtgtgctgcgggtcaccatttgcagcaatgtcatcaccttctccaatggtggatagtggatgccttacaacgtccgtatgctcactgacaacatcgaaaatgcgcggattttcgagatgacaagttttcattcacagcggtgctggcgcaagctgggccttcgaaacgctcgtcttccgccttccgcacggtgcaatttcgtcgcctttggtagtggagatgccatgacgaaacggtgtctttggactcgagcttcgtgcgttggaaaccatcaaataagctttcgaccttacaaggtagtctttaaaggccgagggtacgagataggggatattgaagagaattacgggagatacgtctcgggaggtgggcggttcctgtgaagaaaggatcggtgtgagggagaggcccggtctgtaatatcggcggttgtaggagtggagatatcgcttctagaattgtcaatttatcttcatgcactgtgtctatgagcttgcccaccgttgtgacccgactctgctaccatactccttcgactgtgatcggtactatctagcgacccaccaaccaagctggggcttgtcgaaacccttctctccggcagctgacgacttcgcgatgaccacggaaatgagtcatctgcccttggcgacggcaaacgcgctggggaacaacctaaggggattagcatgatcgtacagcactgcgtagggttggaaatggttagaatgtacgagcatggttcagaatttgtgctaattgtgccgaaacggtctggggttgaaaccaacagcttgcagaataggggggcagtataatataggcggtcaagcgggctcaccgtccaaagttgtaggaaaagcggtttccagcgccagagtcatttctgatcccactccctgctttctggttatagttaatgaatgtcgcctgacccggcacgggaagtcagattcgggtacagggaaggaggtagcctagtccatcattccccaattgcacagaagtcccgttcgagcacgtatatagaagaacccggaacgctgtcactggtcttgtttgacaagacctgatctccacctttgccgtcctttgaatagatgacagccttgtaaaggtccaagtatccacggctactaaggccggattggataccccctatggaccggataccgttctcgtcggacatatttcccgcatagtaacgttttcaaggctgattgaatcagaattcgtatggcgatggacctgcaggttgtttcgagaaggtccaaatccgaagcaatctgactggctttggtggtcgcaacgagttcgaggccctgcgatctgctcaaatgtcagattggggattgcatattatgaaacacgtactcgatgtctactacaaggcagtaggcagtataccactaaagtacgtgtagtcaatttcggttctcattcggattgcaactctctgccgttgcgatggctagcactgcgaccccccgaggccaataccagcagcgcaagctgcacagcaataggaatcttcatccgatcatctaagatcggggggtaaaattgagaggtttgtccgatttgagtcaaaggacagactcaagcgtagaaaagtcctgttgacagctgacatgtcaagcccctgttttgtcacacctacatgagttccagatgtcttcagatttttttgtcttttctctttttgtgatagttcctgtgctaaagtgagaactgaatgaagcggaagcaaaatggaaattttgagggtaaaacagggcagtcaacaagccaaacagtatgggagatggagactggtacatctacagatatataatgtgctgacaagcgagccctattttacctactctagacatatatatgttatattttattaaagagaatggcttgaggacttggtgaaaatcgcccaattccaacattggatttccctaccttctttaccatcttctcgtctagttttggatacaaagtgtttaatatctgctatatattgctacggcgctcgtcccaaggtacccttgagagtatctagattcaccgtgtgtatttacttcgagtatctcactaagagggactagaccagaaattaataacacaacagcagtagtgatctgaaggcaaagatgagagaagaaggattgattctctacaagggctaggtagcgaggaagcacaaggcagccaccaggacgtcaagacgtcaaggcagatccatctcagcaggaattatatacatttaacagattcacaaaacgatgctccatagaaacatctactgggtgtagaggcagccattggggttctcggtctccacgacacgagcggcaatgcccacacagttggtgttgccagcagggttggcaacgccagcagaagcccagatactccaggcaccgtcaatgctgttggggcaggcaatcagatcgtttcctccaaactgaaggtggccatccttctcggtccagcccttgcgctcggagttcttgggggtgggctgagcaccggtggtgtatccaatcttgccctggcctgtatatcaaagtcagatagttgccaacctggattactgtgagagtgataacatacccatgccggagcggtcaacgtagatctcctggggagtggcggactgatcatagaggtacagagcaccgtcattgatgtagaaggtcgcctgctgctcctcgggacgagcgcaactggcaccctggctaggcagaccagcgaagatgctgctcttagcggcgttgaaggcagagtactgcacaccgctaccagagtgaatggccaagacaccaaaagtcttagactgagtggaaggagcggccgaggcaacggcgctgacagaggcagcgatggcaaggttcttgagctgcatattggaaaaatgggaagagaagatagaatatcgggttgagaatataaaattggttgggttgggaagattggttgataattgtagagacatgctgaaatgccgtcccttttatacttggagcgccaccgtcgccgaggttgatgtctcacccatcatgactattcccagagccaagcatccgactacatcagactacagcattcgatattgcccaaactgacatcagcgtgactattttatggggcaagcatgtcgatctctgtcacggtcctatcaataatgtcttatccctgagctattaacggtgatactccatataattaattcattttagaaaatattataagcttatcattatacttaaatgagcattttcaagtcctgaatatgaagaaaattactccgtacctcgcccctatgttgtatattgtaaatgatttcaatttcagtatggccccattacgacctccatatgtatgtacaatccatggatatataggtactcccccatatttgttccatgtttctccgaattatatccacatgcgcacgatatccgaatcaaggccaatcgggttataatgtctttatgcaccggagaaacagacaatataggtggactacgccaaccggttttctgcctagtttcggtcatttcacctgttatgggtccctcaacaaggatctataaatagccacgggctcaccgttctgtggaatctttggcttccacttcaacggaattgtacactttttgattatgttgcatagtattcgtcaatcttaaaatcttatggctttatgagtattgaatgagatgaacagtataatacacacacatatcgcttctcgctccatgatatcacggaccatgaagatgcaacgcctagaaatgaattccctcgaaccagtccaggattgacagaatttctgtacaagtaccagcttgagcacgctcataacccatgtcaagatatgctaataacaagaaaacaaaaccgtccttactcaggagctgcgcatgagaagacaccaccaacttcgcctttgtcgtacttgattatctagtcgagccagttagtaagacaattcgtgctccaagataagggctatcagggaaaagctcacaatgtcatcaacgctggaataggttcctgcaacaagcaccaccataccgatcaggaaaatcataatgttgacgactgccagaatgatgttcttgggctctttccagctacccttccgaaggagcataaaccacatcatggcggggaagtagaaggtgaagccggaaatgaaaagggcagaagagattgaaagcaagtcgttgaaaaagggaatcacctcggcaataatgaatgccacaattgtagcagccgtgatcaccgccagccacgtcagccatcccatcttagtattgatgaagcggataggggagttggcgaagatacgaccatgaaccagacgcccaaatacaacagtattgatcgaaccactaatgaagatcacagggagagcaacgccgtatgcaacgcggctgagggtagttccggcagaggtaagtgcagggctagacacgtcctggccaacaaaggcgtagattgtagcaccagtcaccgtgtagataacgatctcggtgatacctagtgtccagatcgacttaacaaagtcccgaggagtgtgcatttcatccatgaaggagaactggcacatggcaaaactgtaggcgaagatgatgttcgtcacagcaataaaggcttcggtgaaggtgaggtgatcctttggccacgcagaccaggcaactccggagagtccactgggtgagttagtcgcctccacacccgtaccgataatagtgattccaatagccaagatgatggatgcaaaatcgacatagcctaggatggccacctcggtgaaactaggcggaacagcgagcaacagcaagatgatggcggacacgacggcaaagatgatcgagcaaataccgcttttagtgatgtcgaggaacgcgatagttcccgtcagacaatgcgaggccgtgaggaagattagctggagaccgagcatgccattgactagctcatatccaaagcgaccacaccctaaccgatggcccagcaaccgacccgcatcggcataattggcaacctcggggaatgccaatttgaccattccgacaatgtaactggtatagatggcgataaggccgatgcccacacagcagagcacaccggggaccatgcctagtgttgcaaaggtggaggggatcgacaaactgccgagtgcaatggcttcgacgatgaggacgatggtgagtcgcttccagccgagacggctgaacttcttgataccgtgatcatagatgttcctctcggcctcgctcatttccccgaccatgtccccctcaaacggcggtgggggaacatatgcggccttctcgccttcggttcccatcaccttgtcggcatcatggtcgttggagatgttttcgaggcccatgatgatggttgggaagtgagggtagtctgccgagcaggaagggaggaaaccgggtatataagaagacaaatttcgcacactttcgaatgcggcactatcaggaggcaaagcaggatttccgtgactaacatgatttcgtgacttctgcttggttgctccaacacgtggagtacgacgctgatccactccagtcgatcggccacccaacgagctgaccggaaacggggactggacccatttgagtgggaattttaggcgaattgtcgcccggcgcccccgtcaagtgttcgctatgcgataagaaggttcggaaggttaggtaaaagaaatgcaacattggtgtaatgtgtagtttggagggccacttgagggccgagagtgctttggacaatgtcacactatggagtctctccccgcgttaccgattgcggggagataaaatcagtatggtcgtaaaagaaagcacatcgaaaaataagaatatagacattgaaggtttttttctttcatttccttttcttcacgccacagaagatcccgaaagccgacttgccaatgaaagactcggaagggttggcccagcgccgactcgcccgtctgggcagccgataagaatttttacagggtcacgtgagggctgcaaacagagcaaaataagacatcacatcaacctccgatgttagaaggaactgtctccgtactactccgtactccgtacaccaattacagagtacatatgtatacaacggactactccgtactccgtacaaggttcagacaccggatattctcgtgtattaccatgcagaacaaaccccagccccccaaccaaatcgagatcctcttggggtatcttcctaaacctggagatgcggagcaacaccaaccgccattgggtttagcggccgtgagaaaatagcgcaaatattgacttcatgattcgccgtcgccgccttggccgaaatctcaaatgcgatagaatgggtctcaagggacggcataaacatcattgcgggaaaatccccacatgtgcagtctccaactcagtcggtccgcgtcctttctactccatacgtaatgaaacttaatttccccaactttcgcatctgcaaggttgggctccctactccgtactccatattatgtgtctacctcgtggtcattgcttatatccgtgctaactaccccagactagttttccgctcatagagacatctagaaagaccggatacacggaagctgcgggtcatctcggtcataatgcatattcaaacctgaaacacggcacatcccatgcgggattttgtgttggggatctgtccatgcccaataggtgcggtatttccactgaagatcctcgccatatggcgtatgttgtacgacctctcccgaccgtggcgagtttcgccagtcacttccgtatattgtacatggtaccgcccggccgcggcaattcagcaatgcactgtccaaatggaagtaggatgacattctcgagcgccttttcttaccgcagctgcggccgtgcgctggcagcaattcgatcatacatagtagatacaaacgtgttctcatgttcttcatcgcaaccgttgccaacacgtagaatagctgctgatgacactctgtgccgaatttccgcagtcgaggcctcaatggtccttctcttgctacttgcagtacggagtacggagtacctggcaagcaatcaattgctacaaaacacagcatgttatttgatacatttcggtgataaccctgaaggtcatccctgcgtgtcgggcgcaacagacggatggggaattcagctgcgattcacaggcgagattaatgttcataaagattggtccaaagttcttctggctccgtttccaagtcactttttgttaccccacataggcccgttcagtcatgtgcaggacgacggaggctccaccggggtggttctcgcgtcttgagtcgcagagctcctagatctatgacaccctggtatccctggggggggggggggggggggggtccatattaacagatgtcgtcaattgagcaactgaaaattccaggataaacatctcctgtctcctgtttcttcattctatgcgcgtaactcatcattcctgctcactctgctttctctgttgcagccaagcctctggtgaattgacttaacaccagagcctcaccgccactccagttctttagcggctttcaactagcattcttgcttcaagcattcagcaattgacttcccaacgtagtccacattttgattgttgaggccagcaattgatatgcgagagttgtctgccatgtaaatgtggtattgctcttaaggccaattgtcagcaaatcacgaataacagtaataacgacagaacgaaccgcggagcctaagcacaacacttggggacagtcccagaaatccaaacattccggactggcggatcaggtgctcccaagagccaagtgcgcctagtcatgttaaagatcttcggttgtctgctctggacaggcgatgcataccggaggataccagactctcatataattccgacctcatagagcgaattcggctgctcatggtgaccagatcgtcctgccaagcctccctaagggtagcatcggctaatatcgtcctcgcaactttcgcaccataggctggggggttcgaaacttcggagcgctgaagcatttccagcattgattgggtctttacggccgcttgttcagtgcttgttgccaataaaaagcagccgactcgttcacctatcaaaacgttattggctatcattttttgaccataaactggctgtggtacgggtacgtaccatagagccccatgtttttcgcaaaagacagacacactccagcttccagatttgtctcctcgataaatagtcgaatggcaaaggcatcactatcaacattgccggagttgaaccctagataagcagcgtcaaaaagcggaaacaactgcctctctttaaataggcgcgcaagttctcgccattgctccttgctcgggtcacatcctgttgggttatgagcacatgcatggatgatgaacacagagttgggctccgccaatttcaatgcagaataataagaatcaatgtccaaatctcttgtctttgcgttatagtatctgaaagattcacattggaacccaagggacgaaaacacctgatgatgattcgaccaagtcggctcagggatgtatactttgggaagaggtgtcttgcaagctcttaacaaaagtccagcaaggtgtagtgccccagtaccggagagactttgacaagttgccagctatttatacgatcgtcagcttttttcttgaaagcaaagatgtgacgaagtacggaagtgtcaatactttgtcctgttgcttttgaaacaggtctgggccgagtgctaactttgcagcctctttgcggaaatctgccagaccgagaatagggagatattcgtggtccaactccgatagtaacttccgactcttcctgaccgaaggaagaacccatgggttcccatgctcatcgcggtacgtgccttggcccaagttgactttcttgggagatgtatctgcaagatactgagcagtcagtgcaaaaattgcatcgggttggatgaaacgcgcctggtcaaaccaagactgggtggcgacgttccgggtgatggtttgagaggccattgtgtgaaatcggctcaatccaggagttcgatggagaggctgcatagtctcggtcaagggctcttgttaagtattagagggagctgtctgcaactcgactgatatcatcgtcgggttccaggccgagttgcccaaagaacccccacttgcaacaacccggccggagtaaacatataaacacctcggaaatagggccgagtcaaataaaccagattcaatcacattaacaaactagaaagagttttaattggtcggtcgggtggaggagccgaaagtggactggtttgggttgttgatcttgtgtacgagactggcttcgtcggttctgacatccgacattggcatttcgaacggcaaaacagcggccaaatagctcaaatgaatcggagatatggccgtttgcccctcattccgaccggagaggggaatatcttataagagttatatactaggactactactaggactggtgtaatacagtcttcccgacctatacttctacaacttctacctcttcaatgggttctcacactgtttctccccaacctcatgtcccttcgtcgggagtctggtgccctgcggtcactttctttcaccatgacaccgactcgttagacctcgtctctcaatccaagtactttgcttatctatccaaaaccgggctagcgggtctagtaatcctggggaccaactcagaggccttcctcctcactcgtgaagagcgatctcagctcatctcaactgcacgagccgccgttgggcctgacttcccactgatggccggtgtcggtgcgcactcgaccaagcagaccctcgagctcgcacaggatgccgctgccgctggtgccaactaccttctcgtcctccctcccgcatacttcggcaaagcaacaaacatgaacgtggtgaaacgcttcttttccgaagtggccgccaagtcacctctcccagtggtgatatacaatttccccggggtgtgcaacggggtggacatggactccgagaccattgccgctatcgcacgggagtcggcgtctgcgcatgccagtggacggtccaacgtggtcggggtcaagttgacctgtggatcggtgggaaagatcactcggctggctgcatcatttgcgcccgaggactttgcgacttttggtggacagtccgatttcctgattggtgggttagcggcaggaagtgctggatgcatcgccgcgttcgccaatgtctttcccaaagtgacggctcggatctatgcgttgtatcagaggggtcagattgaggaggcggtggagctccaaaggaaggcggcgctcgcagaaagtgcaatcaaaagtggcattgcgtcaactaagcacgcggtggcatgctactcggcccagttggcagggatccaggatgcagcaggtaatctggcccctcgacacccttacgaagaggttggagagggggcgaaaaccatgatccgacaggtgatggctgaggttgctgagatcgagaagagcctgtaatgaagtagacgtgtaccaatgaagaggaaggtcaatttctggtaaatatattcctctttcctttttttttttttacaatgattcatttaagattgtcctgagtagttccggggttatgttgtccacctgggcaacgtgttcaggccaatgagacccggcatgtacgagcaactaccggactacacctgggcatatgtactttaactacatacataactattaactatcaactatctctctcttttttctttttcaccgcactcttattgctagggactaataatattactataaataactcatattccaatatgggcgaccttaggactccgacctaagcactccatactccgtacagagtaatcagacataacatcacatcgacaaagaacctccatagaatatcatctcatgctatttacatatccaaaacaatagacccgtgaatcacccgtgaatcaagtcccactacattataatcaccgagcggagttatggagtacattagatatgcatttaagacacaaaggctctcgactccgtatagttaagccctaaattcataataagacaaatcccaaatgaacctcggcttaaaagaagaaaaaatttcccctaatcaaccatcggtccaaccgagaaaccgattactgatcgggccgggactaagtggagattttcgggatcttgacgatattgaagccaatcaaagtgctttttctatatttttcttcatttttctctttcgttatggagtgaatatgcggcttattccagctaaaacaagcagtgtctccgagatgtacggacaggtgtattacatatagtatgttgtaggaaactagagaaaatttttacccatctcacatcttacccttataattcatatcccagatcgaacgcagatcgcagagctctagagttaatctcttgactctcaacaatggaggtctccgagactgctacctccttgcagttgccaaactccatccccttctggcgactcgtcctcaaacccggtgctatcacccaagaggttgctgaccaccattatgtcggctcagggaccgaacaagatccctatgtcgtggattggatgcccaaggactttcgaaaccctctccaattaaaaacatctatgaaatggttcatcaccgtggtcgccgccctcgagaccttggtcgttgctctggtctcgtccgcctatactggtggtatcgttcagatccaagaacgatttggcgcaaccaccgaggttgcgaccttgggagtatccctctacgtattgggcttcgccttgggtcctctgatctgggccccgatgagtgaaatctttggtcgccagcttgtcttcgtcacaacctactgcggtttgaccatcttttgtgccgcttgtacgggcgcggagaacatcgaaaccctactggtcttccgattcttgtccggtgctttcggctcctctcctcttaccaactcgggcggtgttatcgccgacatgtttatggctcgcgaacgaggactagccttgtcggccttcgcgttggcacccttcctaggacctgttattgggcctatcgccggtggcttcctcggtatgtctagcggaggctggaagtgggtgatgggtctcttgggcattctctgtgctgtgatgtggttcttgggagccgcgttgaaaccggagacctatgcccccgttcttcttcgccagcgcgcgaacactctctccaagctcacaggtcaggtgtactgcagcaagttagatatcgatcaaggacgcctcactttgaaagctgctctgaagatctccctatcgcgacccatgattcttctttttcaagaacctatcgtcttactgctctcgatctaccttgctatcatctacggaaccctctatatgcttttcggcgccttcccgattgtgtatcagattcatcgtggatggaatcaaggtgtcggcggattagctttcatcggtgttatgattggtatgattggtgcggttgcgtattccattcctgaaaaccagcgctacgcgaaactcctgaagaagaatggtggctatgcgcctccagaagcccgccttcccccgtgtatgctggcctctattgccctccctattggactcttctggttcgcatggaccaactctccgtccgtccactggcttgtaagcgtcgcttctggagttcccttcgggttcggcatgttgctcgtcttcctcagtgtcttcaactacctaatcgatgcttacaccatcttcgcggcatctgtcttggcagccaatacactactgcggtcattgttcggatttgcgttcccgctgttcaccaaatacatgtatcaagatctcgggatccattgggcgtcctgtgttccagctttcttggctcttgcatgtgtgcctttccccttcctgctctataagtatggactgtctatccgaaaacattgcaagtattctgcgcagtctgaggcctttgttcaaaaccttgtccggggactccaagaacccatcgagtctgccgagattgggcctgagatgtcccaaaccctatcggcaatcgatgaagtcacatcactctctcacaacaaggaggcccccgctgatgttcgctcaatccatcacactctttcgcgcacttccaccaatgccacgcatgccatgcatcgggtgcccacatatgaagccaacccttacaacgtcgaccgcgtgcatacgcgagagtcattcaaataattcaagtcatcaatcatagaaggagaacacgggcgttctgggggggcatgttgagtatatataccaagagggaaaaggtcgagtctttggacttgacgttttcaaatggtgcattacttcatctttctgttttctgttcttttttccatttgtcatgtcgcatatatatataccatagatcgcgttgactattaattataattgtggtccaatatttcgtgatctcgtcttacggtaatacatagaacagccctctgtacggtttatacatgttactgtctgtgtatgttgtacatcgtagagtggtaggcccgagtgtaacatgaaaaaggaatatctgaaaggaacatagaagacatcggagggttatcctacatataacgtcgctattatcatcttgagttaagaaaaatcaggttgttgaggtcttacgtcgaccaggacaggccccctacttttgtgaggacataaatataaacagtaatgattcgtcatccctgataacccatatatatcctaccaaggcatactgcccgtgtccaatttatcaagtatcccatattccacgggtaaacaatgaaaagagcaactcccttttagtgcacaccattggccagtccattggttaccccgttggtcaagccatttgacattccatttgacattccattggtcacaccattagcaattccattgattttatcaagaggtactcccggtggtactccgacagaaatggtgctcttcttccggcgacgctccggtgcggtccagatcgagccatcatcgagcagctcctgacccaaagcaagcaccttagacggcgcttcgcccagccattcagactctagtcgatcgatgttctgttcgatttcccaggcacggccaccttcaatgaacatggatgtgccattgagagaccggtcagccaacactccagtggccacagtagcaacctgctctggactgttgatgggaagttcggcctgcttccattgtgcctcaactttcttgatgctatcggtctgggtcacccagggacagacggtattgatacgaagatagtgcttgtacggagaggagatgtaggtgcgtagggaacgcatgaggccagtgacgccatgcttggaggcttgatatacgaatagagacgggctgtccttgaaaccagaggcacacgagaataggagaatcgaccggtcgcagtttgatccacggttatggcgcaagtagacggaggcgatgcgagtaacatacattgaaccaagaagattgacatccatgactttgtgggtgggggtctggaggtaatatccgtattgtcagatgtttcaaaaggaagatgaaaaggaagagagaaaaaaaaaggagaagagaagaaaacgtctggctaagcaatcggattgttatttagccaggggtaacttacctggcggacggtctccagcgtgagtgaagtatcaaaccaattccctatttccacgatactagccgccgagacgacatggtcgatgcgcttataggtcttaaaggctagatcaaacaatgccagcaccgccgaatagttggtgacatcggtggtttggaaaattgcgcgtgggggcatgtcttcttcctctgggtggaattggtcacagcatttcttcagtagacgatcgcccgcgatgttatcgaggtcaccaatgcatacattggcaccacgctccaagcattgcgtcactaggctggaaccaatgccattggcaccgcctgtataagacgaggtaagatgacagtagagaagtccggtgacaggttcgacatacctgtgatgagaacaacctttttggcaaggcaatcggtgggaatgctgggaatatactgcgacattaggggcagatcagtgggggagatttaagtggatcaatagagatgatcgtggagctaggaagagtagttgcagatatgcaaaagaaattgctgcggacagtgggctcgcttttatatgtgttgactgtgcagacacagggggtcggagtcttcgtcggagtcagaatttcctacaaattcctaattagacagaggttgaggggaaggaaccaatccgtttggatggtaccattcctaagccgtggcatcccaggatatggacatggccccggagacgacggtaactcagccgagggccaaggaagcacgtccaggtgttctccatcaagggcttctgcataaacaaatgagcgattccgttggcacccgcgctcgtggaaaagagccagtcataaaaggaaccaagatgggatgatgcggggaggcgttcgccaatgacgctggtgtgcagatggaaaacacgaagccaaagcacacacgggagggaaccaggctaatacctgggcaattggcattgacttcctgggcctataccatggggttcggaatcctgtggtccgaggtctgttttggctgtctcctcagaagtcccccgacagcctacctaggtagacattgaaaagagtgctgcttggtagacagaaggatattgtttctgctcccccacaaagatcactatatgatgtacggagtacggagtacaacatatatcaatcgtacatagtacatagggactgtgcatatgcaagagcggcaagtcggggaagcggggaaaaggacaaaagtaccgaatgtaacagttgtaagtctcattctcataaattagttctatgcaattcaaaaaaaaagaagaaaaaaagaaaagaaagaaaacattcactcttttccagtacatgtccatgtccatatccaaacccccccccccacaaaatcatagatgcaattgctgcaaacatggggaatacagaacatgaaacatcaaaccagcaatttgaattctatcaagaccgaaaataccaccagccaaaaagacgcatatttacaactggcctgtagaaaactctaacgacgagagacgcagcacaagataccagacttgcccaagaaccaaagggatccaataaagcggaaaatcgacagaccggcagtcgtccacagaatagcggcgaagtatttggaagtacggacggtagaggtgttctgtgcatatgttagttcgtgccaccctatatcttagacaaggtacatactgtgagacagagacgtttaacgccttcactggtgatacacagtgcaagaatcaggttgctgaaaatccaaatcaacaccaggttggtacggaaagccttatagccatcgtccatgcttggttcatcattatcttcaggctccacatatggctccagcgctctcttcaccgtcgattcaaactgactatcgatatcggcctgcggcttatcgacttcttcaatgaagttcgacttggcgtcatccttcttggtctcagcgacggggagcgaatcgcccttgtcagaacccttagtaccccaggaaacgtcatgccagttgcagaaagcgtagaccatcaggatattgatcgaacaggtcatgccagcaaagtaggcccaggaggacgtgaacatatgccagggatccatgtacaagaaacttgcgaggaagtagatgccataagtcgaaaccaaagcgatcaggacgataccggccccggaagaactgaagaaagacttgaggaagtggccaacaccttggtccatagagaaatcaagtgtacctccagtgaaggcgttcttgacaaggtagaacgacagaacaatgatgtaactctgaaggatactgaagtagatgaatgaaagcgtgtatgcgagacgggaactgtttgaaatgtcagattgagactataaggggattcggttggatcttgactcaccctttcggtcgattgcctagcgccagaatgaactgcagcatcaagaagaatatgtacccatacttcaggaagttgttcacgatcggcgaggcttcattaccaaaaggccatcccttataatagttagattgactaggagttccgacaagatccataatgacagtagtagtcagccagaacgaggctaggtagtaacgaattagtataaagtcacaaagaaacattggattcgggacataccgagagagaaccaggtcatgacaagacccatgaagttgtatgtcatctggatatgcaggaaaaacagccgcaggatgttatggccactcttgtaaatccgcccgaaatgcatcattgcatataaactggcggcgaacgaaccgttcaaccaacgacgtcgctgactgataaactcggcagcaccttctggtacatcggtttcaccctttgacgccttcacgtaggttagatgccatttgaatccagccttggccacaagctcgaaacacaagatacggtcctcagcaaggaacatattcttcttaaagatattcatgccctcaatacccttcttacccaactgctttgagagtgtatgatcaccgtggaagtactgctctaaggggcgacccataatggcgcgatagcggtacgcggagaaggcaccgggtaacacgctaacatacccgaaggcactctctagcggtttatcaagaatgttggagatcttgtactcgaagttctgtgcggcgacgagggggttcatcaagttcttccacccttttcctaacattgcgtgaatctcgccgcaagatccacccaagttcttatcgttgtagaaggactcccacaatgcaaggagcgatttctttcccggcttagttccggcatcaataagaatcacgacttcggggttgaggattcgactgaaaccgttgaaaagccagcggtgggagttaatcttcttactgttcttctgtttaagacagaaaatcatttgaacaggaggaaggtttgacgactcgttgccctgggggcggaccagttgttggttggaggtgacggagagttgggtggtgtattcgaactagggcttgttagtggattttggtggactataaaaacaccaggatggagggacagtagattccgcccaggcgaatcgagaggattatgggaactcacaatgtgtgcgacggtttcccggccatcgacggaacgcttcatgatgccatcttggtagataccgattgtggccaacaaatcgagggtattcttatcgcaaggatcaataccatcaaaaaccaacgagcacacgatcttttgccaggccgggccacctttgttccagaattctgacttcttcaaattgacgatatcccgaatgttttgcatgacaccgtggagcgtccgtgccgtcagaactttatcttcgttgtaataggtgatggcaatcagaagttcggtgtgtcggttgtacatggccggtcgtagattgtatccgttgcgtagggtgaactcatcaggatcacaggtagccgcggtatctgcattcgattagccccagtcgcatcgccaatatttcacatgaagccctacagcgcagatgtgtgaattcttccgggaacccctcctctgattcccggtactccttctggatggcgttctgaatggcacttggtaccgggtagtcgacactcagcacagagccctggaccagcttaatctttcgcgtagcataacgccgcaaccctgacccaggtgcctgtcggttctgccaggcttctgatggtgtttcggacataggtgattgaatagatggaataccagagcgacgattgagtcctcccgcagactcctgatatggaccatcgggaaagatggtgactccgggatcatgtagtgtgtagcgacggagggaatcggtcgaggcataggggtcatcgaaggaggcgttgaatgggcttggttggtttcggtagagcaaagattgctggctgtcgatgttctcgggtttttcctcgtagccgtacgcttgctgctgaacaaactgtgttaggatccgttgctgtcttgctggggtcccttctatttccccgttccgggtggcttgtcactcacctctcgtggaccatacccgctggcctcgctcgcctggggtgaatgagaggagttgcccgaatgaggcgaatgaggagatgttcctcggtgaggaaaagacattatgcgtagttcacgtgttctccagttctggtggaaaggcaatagagatctagccggcggggtggtatctcaaggatcgaaagaaaatatcaagggtagaagttccaattccaggtacaacccggcgcctcaatggtaacagcgcaacaaggcagcaatcgccgtgagctaggttgaaagcaagacaggtgacctgtccagagatcaaacctatgtgagaaccaatatgagacctaagtagaagagaccggagggttgatgtccaaagaagagatgtgcggtaggggaagggctccagattccatctatccaggagatatttttggtgcagaatttgattggaggtgccgacgatgcgggctgtgaaagggcgactgaggtggaaccccagcgcatcagcaattgtcgttcgtcatccaccctttttaaggatccaccatggagccgtccgagacagtacatattaggcattggcagccgcttttcccctgcgcatgcatcgcataaatattgaggggcgggcgcccatggaccaaccaccgaatgatattccccttgatcatgattgtctcgatatccaaggtatacaactcctgtacgggtatgaatttgactctgtgatccgagccttgctgcaacgaacataactcgtcgaacatgtaaaaagctgcgggtcgacgacgcaacacgccataatattggtcaacagggtgtctccgatgacccatcacagacatccccctaatatttgtgtacatatcccttctaccatcccgaaacaccccctgagtgatctttgaatcaccagagtacagagtactccatgctcgtaaagaaacactgcaaaggcctctctgccaagaaatcacagcgtggcggctgggggtggcaactgccgggggaatgacgacaaggcgtcaggaaatgatcggccgcgtcttctagggggctgaatcctgaatctgcgactggctccggagggtccacatatccagccatcgttataaattgggtatgtgggtagtgaaaaacagaaaggaaaaaaaaaaaaagaggaattgggctaccacagcaacagacagtaacagagtcagtctatggagagacatgccgaagaatgtgtgtcatgtctacgtatcacgtgctccacgatatacaacatacgtgtacacaacttttcccaaggctatgtacagcacataatgagtacataatggagtacaacacaacttggaatataaatgcaggtgccttggtgactgtcatttatttttagatctttggactctgcaagggctgagatagaagttgaagttgtcaagttcttggaaatatatattcccatccaagaccataagtctctcatttcttctagatgtcgtacgatgtgatacctcatttttcgtttcaaattgatttgactgacatgtgtcgtttctctgtgaccaatacctttttaccctgggtttctgtcattcgtgtcccatctttcgtcttatccccccgacactcggacttcattgcgagcgcaggttcacgaaaatagatctattgaataccccgataacttcactatcctagtgcggaggggcaatgctcatattgatttgtcgactctcttctaacttcaactgtatggagtcttcataatctatgtaccccgtatcatcagatgagatggcgctaagccttgcccgaggtctattgatatggcaatgccggtacaatacatatgggtgcggggtaaacaatatgatttacacttaaaggtcttcttctcatacttttactttgatattttcgccctttgcataacgatgtcgcctcagagacctgcattcgatgacctacctttgcgcaaagatggacccccaggaaatgcttgggggatgtttggagaccaagatcaaatgggcatgctcaatcttctgacgccggagaacaccgctgcggctgctcgcgagattgttgatggcgtacgtgtctcaacagattgggctcttaatagcatggcgaccccctgctttggacgttctgcttttgagcatattgtcaagaacaaggctccccgggtggtcaacgatgatatcttgatcttcaacacacagagcagcagccaatgggatggcttcagacactatggatcaaagcaaggaacttacttcaatgggtgtacccaggacgacatccaggattccactcgaaatggcattcacggtaattccttctgattctgaaatttctgatctccactgatcctccctcagtatgggtcgaaaacggcggtgttgttggacggggagttcttttggactatgcgggctgggcagcggcgaacgggaaagaagtgaaatgctttgaaacccagtcaatcccggcatctgtactccaagaggtagccactagtcagaataccacattccgaccgggggatatcttgtttattcgcacgggttggactcgagcctacgaacagctgtcacgggcggagtgtcagcaactggccgattatgcagcacctccagtgattggggtagaatcgtccgaggccatgctgcgctggatatgggatcgtgaactggctgccgtagtgggagatatgccgagctttgaagcatatccatgccaaaatcaggcctttttcctccatgagtggttgctggctggctggggcgtcccaatcggggagttattcgatctcgagcagctcagccaggagtgtcggaagagaaaccgctggaccttcttctttagtagcgtgccattgaaggtgcgtgtgtagacaaaattccactcctgttcccagactgaccacattcatcaggttcctgggggggttgcaagccccccgaatggcgtggctatattttgatcaagagttctttcatctttgccccttgtcgttcttgcccatattctactgcctgaactgtctggagatggcgcagaatgcaagtgggggcgtttataagcaatgacacctccaagaagaagcttgaaagtcttagatatatcagaatgcaccaatctttttaaacataggcgtctaggcatcatgacccagagtaatataggcgattgctcttcatccgtacgatgttggctaagggaggtcgggccgaggagagaagtgaaaaagcggggaatccggggctttccgccccggtctgagttgcgttgtcattctacatttcaccctatgttgtatgcagatctaagcaggtctaagcaggtctagcctcacgaagaaaaaagatcatggtccttggaaatgcaggcatttcgcgtcaggcagaagatcgttcaagaaggtcgatggtagcctgtaaccgctgccgttctagaaaaactcgctgcgccggcaatccaccccacccttgtgcagcatgtgtggatgtgggcaagcattgtgtatattcagaggccgaaaagcgagtctctataacagagaggtgaagttggtccatccttgaaaagagtcaatgctgactcctctgtacagctactatcgacaactacaagcacaagctcctgcgtcacgaggtaggtttcatacctgcctagttcgtcacgtagacgcaatttaaccacaggatagaaggtagccattcaacgccgtcaagtgagccgtcgatatccaatcgctactctcatgaggggccaccagaacgtgacgactggtggtacaaagggacagacaatctgttcttgaatcggtcaggagaacatcgtaggtgttaagctgtcaggtgttttattcctattatctccttctgctaatctctcctcagatttcgttggtgcctcgtccaccacacatctcgcgaaacgacttaatcccggctcagcaaaccttgcatgggatgtgcgcccactttacgatgacccttcatcattgagaagaccagttggcggctcattgcctcaattaccacctttcgagtttgccaagcgactattctgggtacaatacgcttacatcggtaccatcttctcccttatcaaacccctggagttcgaagcacggctcgatctagtctaccaccaaccgcttgacttttcacaccgtgaatcttgcctagtatactgtcagacactgttagttatttcctttggtttgatgtacagtgtgaatcagtggattggcgaggaaggccctcctggcttcaagtatttcaagcatgcgttacgtttcttgccagatatccatgaagagggttcgattctctttgtcgaggtactatgctatgtggcatactatatgcagaatctgaacaggcgggacgctgccttcctctatgtacgtattacttccattggccttccgctgtaccgctaaccatgtcagatcggacttgctctgcgcatggctatctccctaggcctacatcaagaggtgtctgatccctcaataagtgaaccagaccgcaaccgcagacgtcgggcttggtggtctgtctacagcttggaccggtaattggccaattctctatgcctttgaaaacaaatactcatacttatagacaggttactctcggtcaagtctggtaatcctattacaattcatgatgaagatattggaataacttggcctacagatgtggtatgttgtcttccatgtcgtgtctacataggtattcgctgatttgacttttcgatctagggtggatcaaccttcgatgtatggccatcaaccgttcttacccactatacacagctatcccgtatattggggcggattggggaaggtaaaaatcatctccgtcgttttttttttttttttgtttgtttgtttttttttgttctttcgccatcctgcagctgacctagatggccacatcagaaatctatagaaagaaacctggatccggttcgaacctcattgcttctgtccagagtataacaaatgacctttctgcctggctgcggcaagtaccagaccggctccgcattgacttcactacactcgatacccatatcaatcgggagtctgtctcaatcaacttgcacttctactcatgtgtgaacatgactgcgcggccattggtcttctatgtcatccaaaggcgactcgacgcggaagccctcgggtccacgacggaggattggaaggaagggctggctccaaataccgttgctgtcatcgacagttgtatcacggcagcgcgagcaaccactatgatcatggatgctgctgcaaaacataatctcgttggtacataaccgcaatacaaccccatttcttctgtcatgaaaccatctgatcaaaaggactttttagctacatacggatacctcgatggcgaatatatcttctccgccgcactgctgctggtcatggtgaacgccgcgtttccgcctaatgaaaccagcgcctgggccatggagaccgcactgaaccttctccgcggcatggcagatcgtggaaatacatacttggactcgcgtcactcattgctgttggaattgtgggcagccattggacctagacgtgctgaagaaaaggataccgatgcggcaagttctcttgctgcaggtcaaaacggccctgtgaccccgatgagcgaaaacgctgcaaatccatcagaagatgttccagatccgagtgcggagtcagcagcttcacaagtgcccacttataactggccacagcagccagatatcccttctttccgggacattgccttccagttcgatctaaacgatgatccagcactctgggaaggggctttggaccaaatcgacattgacatggacactgactggattgagaatactttaaagcggtgagaacaaattcatgtcacttaaaaatcattccacacttgtgtgcttcatatttagtacctacatatgtacctgtaagcactcgacccaacgcacggtccaattcccggccgcacctctgtaacctgcatatgccctagttgaaaaggggttttccttccctaggcatataagctagtcgaacttacctaggtagtctggtgtccgctgtttctaaggttatacacactgttgggtttagtcactgcggctcctcaatcaactccagcagagacaatcaagtagtttcatttatggcgctgggggtggtcatatccaaggggggggtggctgtatcaatgccctattattatagctaaccactgctctcctttaatcgaagtaggccaattgactattatggtataacatttgactatctcgtcctaactaatgatgctaaccctgaggtcttatagttaatatcattgagattgaggacgacaatggtgtttatgcaaatatatggctttcatttgtagtagatccggctgagtttattaggaagaaaggtgctagtagtgccgagatgttgctagaagaggaagggaacataggatcgctggcgagtgaatgcccttgtggactagaggatttatgggttaggatatttaaaggacgctaaagaatggacaagtctgagagaagatcgaaatgcgaaaattgagaacttgaattgatatacgatcgcattccttcctaagacctatgactgtatgatggacttaggatgagactaggcttccgcaagcccatttttgtgtaccggtattgaatgtgtctctaccaattggtggtttatgccgctatagttcttagtgaagggccaatgtcatatggaaagctggtttatcgacactaatctactagaagattatacgatcgttccaacaccaaatggttggactgacgaaatcgttagcttcgtatggtttcagatcttcgatgaattcacggtcttccgtattaaaaagggggaatatcgtcttcttctaatggacaatcatggttcacatttaacctataagttcattctattttgctggcaaaacgagtcattccttgttgaatgtcagacatcgtaggcgacagcacctgtttgctgtagcaaacatgtttgctacaacttcagttttgctatcgccatagctataaatagccctctctctccttctctctcccccatccatcccatttcatagaaatctagcttgcacagtttctccattcagtttctgcatttaatttatatcctgatccctgaacacatgagctcctatcttcccctccatcctcaatctaatccccgcagcttatcaagctatggagatgtcggcccgaggaagccgaaatagtagccatcggcccgacacgtgacatgcatctaatgggtaacagcgcgatgatcattggagatgtgccgtgatatcgggacgagctctggcataaatgagtacggttcccttctgaccatctttatctgttgtcctctccttttcctttcttaaacccagctcacatcttcccaactcatactagtcgcaatgtctgactcgggaaagatcaccatctctatcgatcgcggcggcacatttacagatgtccacgcgattcaacctggccgtcccgacattatattgaagcttctctctgttgatccttctcattatcaagatgccccaactgagggcattcgtcagatcttggagctggtcaccggggagccacacccacgaggccaaccattgaaactcgaccgcattggttgcctacgcatgggcacaaccgttgcaaccaatgctttgctcgagcgcaagggagctcgttcagtactcttcacaaccaaggggtttcgagatttattaaaaattggcgaccaatctcgcccggccatttttgacttatcaatggctcgccccggagtgctcccggaaagtgtcgtcgaagtcaacgaacgtgtcctgtcctgccacccttctgccgacagtgattgcttctccgagtgccggatggtagagggaatcaccggcgagaaattccgtgtggtgcaagaactagacctcgttcaggtgaaggcagagctccaacggctgaaggagcaaggaatcctgtcaatctctgtggcgctgttgcattcctacgcatatcctgagcacgagcgtcaaatcggtgagctcgctcaagagatgggattctcggttaccctttcttcaaaacttcaacctatgatcaagatcgtgcctcggggcatgtcggctgccgccgatgcctacctcacccctgttatcaagacatatattgactccatctcttccagctttgaaggtgggttggaaagtcagcaggactgccgatttgagtttatgcaatcagatggtggactggtcgatttccgcaaattcagtgggctgaaagcgattttgtccggccccgcagctggcgtggtcggctttgcagccactagctgggatcccagtgagaagactcccgttattggttttgacatgggtggcaccagcacagatgtctccagatttgatggccaccttgagcatgtattcgcatctaaggttgcaggcgtgatgatccaatccccacaactcgatatcaataccgttgctgctggcggtggttccatccttacttggcgtaatggcttgttctatgttgggcctgagtctgcaagtgctcatccaggtccggcatgctaccgaaaggggggcccacttacagtgacagacgccaacctattcctaggccgccttctgccagagtacttcccgaagatcttcggcccgcatgagaacgaagctctagacacagagacgactgcacgccttttcaatgaactcacacaaaaaatcaatattgaacgcaaacagcaaggccagtcagagttttccccagaggaagtcgcacttggcttccttaatgttgcagatgagtctatgtcccggccaatccgtaacctcacggaggctcgtggcttcgagaccgcatctcatcatttggcatgctttggaggtgctggtggccagcacgcatgctcagtggcgaaaacgctcggaatcacccgcatcattatccacaaatattcctccgttctctcggcatacggccttgctctagcagaggttgttaaagagtcgcaggaacctgtttcctcaacctacctgtcctcacaacctgcgcttcttcaacacctcgatcacttatcagcatcagcaaccaaggacatggaatcacaaggctttccttccactcaagtgcgccatgagcaatacttgaacatgcgctacgaaggttctgacactagtctgatgatccgaaagcccgaaagctcgggagacttcctagaagaattccgcattcgtcatcgccgcgaattcaacttcaactctgaccgacctgttcttgttgacgacgtccgagtgcgaactattgcctcgtccaaggtgcggaccgagcaaagtcctttagtccaactgaaagaggccaatatgcgagatgtcgcgacggctccaaacaacaccacttcagcctactttggccaggcgagtcgggtcgatacaccagtttaccttctaggcgaattggagaggaattcccgcattcatggtccggctgtcattattgatcaaactcaaacaattgtggtggctcccaacgcagtggcgaacctactcgacacctgcattgtcatcgatctcaataacgaaccaacctcttccggaagcgctctaccatcggaaattgaccctatcaggcttactatctttgggcatcggttcatgtccatcgctgagcagatgggtcgtacgctacagaagacctccgtttcaactaacatcaaggagcggctggatttttcctgtgctctattctcccccgatggaggtttggtggctaatgcgccccatgttccggttcatcttggatcgatgcaatttgccgtgcgttatcagcatgaaaagtggctaggcaatttgaaggacggtgatgttctggtagccaatcaccctagttgcggaggcacccatctacctgatattacagtaagtaattttcacactgaatactctcgtcaaatactgatacgtctataggttattacaccggtctttgaccgacctggcggctccgagatcatgttttacgtggcttcccgcggacatcacgctgatattggtggtatcttacctggatcaatgcctcctaaatccaccgagctatggcaagaaggcgctgccatcgaaggcgataagattgtcagcgatggtatcttggatgaggcacgtttgatcgagttgctggtcacgaagccctcgcaatatcccggctgcgctggagcacgctgcctcagcgacaacttgtccgatctgaaggcgcagattgccgccaacactcgtggaatcaacctgatccagactctgttcaacgaatatggaacgcagaccgtgcaaaggtacatgtacgccatccaggcgacggccgaatctgctgtacgtagtcttctcaaagagctatatcagaaattcaatggccagccattagagtcagtggactatatggatgatggcacccccattcgattgaaggtcactatcgatggtaccaatggatcagctgtctttgactttgagggcacaggccctgaggtgtatggtagctggaacgctcctattgctatcactcactcagccatcatctactgtctgcgctgtatgatcaatgcagatgtgccactgaaccagggatgcttggcgccaattgacatccgtgtcccatcgtccagtattttatcgccgagcaagactgctgctgtcgttggtggcaatgtcgtgacctcacagcgtatcactgacgtcgtgttcaaagccttccaggcttgtgccgcgtctcaaggctgctgtaacaacctgaccttcggtacagacgccaagcttgatccgaccaccggtgctgttatcacgcctggatttggatactacgagactattgcgggcggcagtggtgctggtccaacttggaaaggcgagtctggtatacatgttcacatgaccaacacgcggatcaccgatcctgagatcctggaaaagcgctatccgacgatgctccgccagtttaccctacgtggaggttctggcggtcagggcaagaaccccggtggtgagggagtaattcgcgacatcgaattcctttcaccaattcaatgttccattctgtctgagcgccgtgtccatcggccttacgggctcgagggtggccaggatgcacagaccggattcaacctgtggatcacgcgggatcctgacactggcaatgagcgccgtgttaacatcggcggcaaaaacactgtctcgatgaagactcacgatcgtgttgtcatcaacactcccggtggtggtggctggggcgctgtgtgaatgggttgtatagcgagcatgacatttctagtatacgaatattaattaaatacacaggtggagatacaatgatccttctaggcctcgtgaataaatccgcaaattttctctttcacagcttggaatttccaaatgctggtcgccacatttcattcgctagtcggctggtgtttaccatatctgggcccagttggtctagagaagagacaccaagcatcttcatggtgatctcaagttcctctgtgatgactgcgagtgtgttagcttaaattgacttgaacaccagtcccgacttactgtctgtacatctttccactccttcagcgccatatgccgcgagggcgtagtagtaaggccggccgactccaaccgcggttgctccgagacacaacgccttgaggacatctgctccatcgcgaagacctccgtcaacaaacacctggagcttgtcgaaggcctccgggtagtacgtgcgaatctccaaaagcgtcatcaatgagcttggagcggaatgaatctgcctgcctccatggttgctcaacagaattccctgtacaccgtgttggacagccagcttcacgtcctcaacgctttgaatccccttgagaaccattggcccaccccactctgacgaaatccaatccaaatcctcccaagtgagaccaccatctaccgaaccgggaacctgccgacctccgaacgctggcgcaaagtcgttctcactgtgaatgtctcttgcattttcagcaacaccagcgtcgagattttctcgtgcttggaggtaacgatcggcagtacgctttcctagggttgaagtgtccactgtgacccacaggctttgatatccggccgtcttgactcttcggatgagtgacttggcccttgtccgatccacaggcacgtagagctggaatgacaagttcgaagggcttttattgccgagaagccgttgctcatccagatgagcatccatgatctcttcgaggggctttgtagatgccgtactgatcatggtgtgcaagcctttacgggttgctcctctcactagcaatggttcagcgccagggtgggagctgcccagtgtacccatagccgatacgaagaaaggaaactgagaggtgtgtcccaagatgttccttcgggtgtccattgagtcaacgctcctcaaaattcgagggcggaagtttatcagagaccagtcatcaagattggtcgtcattgacaggccggtagcagctgagcttgatgcataaacccatgacttctccgggaggacattctttgcgaccttctcgaaatctgtcgtggtgacacatagggaaggatggggaatgttgtttgccatcttagcaattgtccttacggatatgaagcgaaaagagtaaaaggaaaaaggaaagcagtaataaagtaacctgtggagtatagaagatcagataacggccccgaagtcggccccggtcggctactcattccggcccggctatgtccacttggggtaaaagcgattgccgaattgttgtagggaatatgcacatctagacatctattatgtatacataatgtccgagtttctgtatagttatctctttttctttacttttcggcatcggaaatgaggtcccgtgttatcccattcaaaatctgtttcgatgttagcttataatttcaaaatgtaaggtgttggtatccatacggcaacattctcccttgggcaccgaaggagtgggatggaggtgtaagggcagttgtagtcgctctttttatcggtatgaatgtggacaaagttgtgggctgctgcgcatcctaaaagacgtgttaaaccgtggaataaatgtttgaggtttaatagtcatacatgtttgtactgcaggacagtcagtgagatcaacattggatataaccttggacaacagagacttacttccagaccatagggaatggcaatcacagttcccatgaatagggtacaaattacttgcagacgcatggtagagagagggcgatcaattatattcaagcttgtacaccacttgcgcaagcctgtgttgaggtggaacaactcggctggatggaggagaacgaccgtgaaaacggcacgtggaaggtgaaatgcctttaactaaatctcaaatcctcaatattgtgactaactttccgtttcaatcttggatgaatacaaatgaaagtgatatgtcagagaatatggtggtaaggagggagtgaatcacaagccctactctggtcgtagaaggtcgggaaacaggctttgtctatacactactccgtatacaacatatatcttatgacgtctgcaatcaggaatctaaggtcaatggaatgtgtgaagaatgtctctcccatgcttactccgcagtgacatctgcattccacctgccctcatatcccttgattgacatggacatggacatggacctagagactttccgcttgcgtcctatgaagaggagatgggtaaaccaagtagagtaactagaagataacttatgggatttgtcgagaaagagccagataatacattagtcgtggcaggtcaccaacacctacatactgtgtgggcaccggatagtcaactatatatataggggattactagaggacctccctagcctagatcgacccccgtctacctaaaagttagcactatgcttagcactatacccagtactatacccagcaccattacccagcaccatacccagcaccatacccagcactattctaactgtcgatccatagaaaacgaactggccagtttatctgctaccatgaaaatatgtatataggattacatgagcataacattgaatttttcccctttaacccgtaagatacttaaaatatgtattgtgcaaatgagtcctatttacttggatgatgtttacaattaggagcctactggtacttacatagatgttatactgactgaggcgtttaggggatcaacggagggggctatatcatcttttgcacacatcaagtttctttttgaaagggatttccggtgtatcgtcgagattatggctagaccctaacacggccttacacataatagtagtcatcctcaccaactggtcttgtttatcgcagttcctccgagggagttgcgcatctatagaactatgaaccgtttgaatatcggtatcccgcttggtccagacgtgccgcataccaatatggccaatggtgatccatatatttttaatctctgcttttcccagggtatttccaaaggaaatatgaccttgtactaactactgctctttgttagtactctttgtcaagggcctccatgggtgcccagccgggcgatgaggggctgttagtaagcatcacatgccggggacctgcagctctagcccagctagttcttttcgactttcgctctcttcgcttttctttttgcgttctcttttcattgcgagtctcaactatgtttgtcacaatacccggttgaccagccatagggcttttctaaaaacatttccacctactttcattaaacccggagacggcgttaacgctgcatcttccccgcgaaccaaggaaaaaagaacaaaacaacagtgaccaggcgtccaaggacatatattgacctccatgaaaaactcaccccctattgtgtttatcgccaggtcagtaactactttcattacgctgcttccgctgctcaccagccttctagacatggcgcccgcctcgatgctgcagacaaagattggcacttaacctctccgagcccattcgatccacctctttcctacggtggatggatacagtctcgggcacttggtgtacgtataggaagtctcctaagggcccggcagttcactggggaagatccagagagtccgcacagccatcatcccacctcggataaacaggcaaaccccacccccgcatcttcggatctgttgcaccgatataacgtcattgttcatacctctccttaccttcgatgtctgcaaactgcgataggggtcagtgctggtatccaccaagcctcaggcgcagaagcatccgaaggagctagttcagctcccactgtccccaccgtttcatccacccctgaccagcgatgtctccttcgcgtcgacgcatttctgggcgaatggctatcacccgactactatgaccagatcacgcccccaccgggctcggacagaatggtggcgtctgccaaaggggaattactccgtcgcgctgaaatcatcccagccaccaatggtttgacaagggcgttgtcaggccactttcctggcggttggcgcagccagtcacatcctacttcaccggatggtgaagaccgcttgcactcctcaacatcccaacgccagcgtgccaacacccacgacactttccaaaaccctatcgccaaacatgcaaagaagtctctcggtcgcctagaaaccaatctgccgcctactctagacgcatattatgtacccccaactcccagctatgccgtttccgcatcggaccccattcctacaggctatgttgctcatgcacggaacgcatgtacgaggatcgactaccagtgggacagtatgcgcacgccttattggggcacagggggcgagttcggtgaggaatggagtaccatgcacgaacgagtacatgatggatttcagcacatgatcaattggtatcgggaacaggatctgtctgaacccggttctacagcagagtccaatgaggtaagtgactgtaatgcgcaaacggtcctcgttatcatcacacatggcgcggattgcaatgctttgatcagttcgttgaacgggcactcggtcttggtcgatattaacacagcttcactcactatggctgtgcgacgcaaccgtgtcaataaacccgcgcatgacatgggtcacacgcctaaatctccgggccctgacaaccaatcggtatcacgggaatactccttgcagcttgtggcgtcgacagatcatctgcgcccgggaataaacccctcacagctcagctcgctgtcatctccctctgtccctgtactttcaccgcctccggtcccttcctatcggaatcgtcttggcgctcgcccatcgctcctccaagaaacgtcaacaaacgggccacatagtactagctctgggccatggacactggcaatgcggccgtcaaccggttcaactacttctcaaggtgcctctgggctttggaactcgatctcgtcgcccactgataaagcggatgacaacctcgtgccgaacttcggtgatcggccggtcagtcaagattccgaactctctgataggtctgataagtcttcagatcttgcctggacgaagcagttaccacaacggacactatcgcagcgtggtttatgggggagtgctcagccgttgggggatcgtgagggtggaacgaagcggcgatggacggtgacggaacagaagctgtgaatcattctcttattgagttttaggatacctcttgcatggcgtggtctttttctttttctttttctttttctttttctttttcttgcttttatccaagtttatattgaaatattactatgacaccccaaccttcaggcatcaaggcatcaaccaggcaccaatgccgcggcttccccctcatgtttgtctctgcgcctcttttgctcttctcctctcacgatctcttctcttctctctcttctctccctgtgtctcttcctttcaagtatatcttcataccttttccataacattgcgacttccatgtcaaacatcgaaacagacggtctctccgtcacttattcctctgaccgaactggatctccggatctacggctaatccactataatgatgtctaccacgtcgagtatgcttcccctctctttctctccctggcttcataaactgcaatatgggatgatattaaatcatcttatatagatctggctctgctgagcctgtcggcggggtgtctcggtttcaatccctcgtgaatcactaccgtcatcacccacagttcgctggtcagcccgatattctgaccttcttctccggcgatgctttcaacccgagtatcgaaagtacaatcacaaagggcaggcatatggtaccattcctcaacacagtgggcaccgatgtagcgtgtgtgggtgtgagtatggcaacctgcccaccagaaatatggtccccgctaatctaagggtctagaatcatgatctcgattttggggtcgtccaattccgccatttggccagccaatgtcactttccttggcttttagcaaacgttcttgaccccgcactaggggaggataccccaatagctgacagcgggaagtctcgcatgttgatctcttccaatgggctcaagattggcgtattgggtcttggagaacgagaatggtatgcggccctggaacacatattttagtgcttttacgcttttccattgttattcctttgcttactcggccctaccccaggctcggcacaatcaactctcttccgcctgatctgatctacaaatccgcatctcaaacggcccgggttcttgcgaaacagcttcgagatgagggagcagacctcgtagtcgctgtcacgcaccaacgtgaaccgaatgactttaaactggctaacaacctgtcacccgatcttgtggacattattctcgggggtcatgatcacttttatggccatgctgttgtcaatggaattcatgtgatgcggtcaggcactgacttcaaacaattgagttacatcgaagctttccgcaaacgagatggtttgcctggttgggacttcaacataatgcgacgggatgttgttcgctcaattcccgaagaccctgacacagtggcaatggtggcccggctcacttccagcctcaaggccaaactagacaagccaattggatttacagtcagcccgctcgatggccggttttctactgtgcgacagcgtgaatctaatttggggaattttgtttgcgatctgatgcgcttctattatgcggccgattgtgccatgatggcgggtggcacaattcgcggcgaccaaatatacccgcccggcatactgaaactgaaggatctgctgaattgcttccctttcgaggaccctgtggtattgctgcgcgttcgcggccatgcattgctggctgcactcgaaaatggggtcagccagctccccgcgctcgagggccgattcttgcaggtatccaatatcaactacgggtttaaattggacgcaccatccgggtcgcgcattacattcgctcgtattggcgatgagcccattgacttagagcgtgactatattctcgccacacgcggctatatggcccgaggaaaagacgggttcgcctcattgcttatccaggcggaaggaggtgatgtggaggagcttgtctctgaggaaaacggtgtgctcatcagtacaatcctacggcaatatttcctaagtctcaaagtactcgggaaatggaaccgttggagtgccagtttaggccgccactggggtattgtacatcgcaatctgcacggtgaaggctggctgaagccagcgtccctcaaaaacgacgagaaaaacgcaagcgatagggtgaaccggcagcctaatccccgacgcacagcccggtcagcatactactacggtcgatttcccgaagaagtcgaacaggtcgacattatcaccggggacgaggcgaatggcaatgccatggactcggactcggatgaggatccagatatcctcacatcctctgggccaatcactaattacgtcactcagccagcgaaatcatccgctgaagaggagcatcgtctacaagttgcgcggcgagttgtccgaaagtggatgcggcacgcaggtctgcaatgcacaaggttgaatactatgaacggcgaaggggaattcactccggcctggacatcgggaatctctcctcggttggaaggacgcattgtggtagagtagccatgctcctctgccgtcttttcctttgttttcccctacgggttcatgtttcgggctttcttctgttagggattttcttatactcttgtcatatttgctgttccctattgcatcatgcatatgcgctggatgacctggtgtttctggctgaacggaatgcatcgataccccgaatatcttcgaactatcctattcaatcggccttcttcttgggaatttctttttgcaacagatagtctcctcctctccaagccttatagaccccgtaaagaccacaaaatggccagacgtcccacagggcacgtttgaccgatcccttccagccattctcgaactctccacgatgtggaccagggagatcagatccacgcactcggaccttttcatacagggatggaagatgctgcgcgtggtatcttgcccgtaaggaatcataaccgggcttgttatagatggaccagaattcgtcctctgtatagtaagtatgtgcatatagccacttctttcctccaagactgtggaccttgtgttcaagctgtcgattttgagccacgaaaccggcctcatccgtggtagcggccgggccccagatcccaaaattgaggagtcgtgtgttaactcccttgccatccgccggatctccttccaacccaccggcacttcctggtggtagcggacagagccaaagcggatattggccaaagttgtcaggtcggtccagccagtccaggaactcggcagcagtggatattggtacaccgacatcttggatgatatatcgacgcgcaagcccactaacgtgcagagcatgatacatcaccttggtgtgcatgaatcggtgaagaagccagcgtgtcagagaggtgaatggaacacagaagtagcgaaaggcgtaacgggcaacccagaaaccacctcgatcataacggaacaggtagtccgtgagaggaatgtagtccactgcatccatgtgaggtgagctctctccgtcggaaatcttggagatcttggattgagcaattcgttcgacgtgcaaatagaaccaatcgtcctgtcgacgagtaaagcgttgaggctttacgttagaagtttgttcaatttgtcgaccagcacaaacgacgatcttgttccgtgcatagacgattccgtccaggtattcagtgcttggatcagcgctagcctcttcaaaggcacgcaccgcgtccttcatattggaattgacatagtatttcagttcaaccaatggctgcgactttttcaatcgaatctccaatagagtgaccactcccaaggtcccaaaggaagatgcggcgccccagaacaagtccgagcggttatccgccagttccgaacccgtcttgacgcggtcattgtatgccttcaccacctgaccatctgccaggaccatttcaatccaattgacagtatgatcgaagaacccctcgcggaaagagctactctcgccggacgtcccggagaatccgcccccaaccgagatgttggggaactcgacaaccaccaaagggaccaacccatggaccatggtggcagccaccagagcacccatcgagacattgggctcaactatagctgtatatctgtcgatatcgatctcgaggatgcgagtgagaggttctgtgctgaccgtgttggagagagatcggttggagggccgagtactgttggtagcgccatgatatatacggaatggttgctggcgactgtggaagtccgctacccgtgctgagatctcttgcacatctgcagtatgatccattatagatatgaaaatgaaaaaaagggagatatagaaatataagcaaaagccagaagatgtaatatgccaagcaaggggaatggaatgagagaatccccagcccgaggtcgccgcatttggagccctggctgacatgaaagacatgaactagtaggatttgtacgaaatcaaattcagaactgtacatcggtatcatcaacatgagaaagaagaaagacaaacagaaacagaatagaagtagagtagaaaattccaagcctattgtaggccaacagggcgtgctcctgcgagattgaccaccctaccacctccagctgctcccactattgtaggcgcccgtggctgtacccaacctggaacactggaatcatgactctcccgtgcagaaatggtctgccagacattggggaatcctgtgggcaaaattcctttgattttggcaccgggaacggcgaatcgaggctcacgatggagaaggtagccacccatcagcccttgtgtaatcaacgatgcaaaaatcgattcaatctcttgcatcatggatgcgtctgtttctatcctgtcgtcgaagtcatacgcatatggattcagttcgtaatcgccatagttctcttctgggtctccatcgaccaattgacccggtagattaggttgtggtcgcccttcttcggtgtaaaatccgtccggtgccaaaaaatccccatattttcctagtatctctcgatcggtggcggggctagcccttccatctgctccttccaggcgggcgtagtcgagatctgtgggttcggaaacgacttgtgacccatagaggttggaggctaccatagtactcgtggtgccagttccggatgatgcgtgttgtgtctgtagccatcgtatagccacaacgagctttttaaggttgaggactggtggaggtcccttctgcgcctgcgcctgcggacctccataggaacctccgtacatgaaaaccttgcgtgcaaaagatcgccaaaccagagtctcgcatcgatttcggagagtaaacagaattcctttgcgtgcaaaccattgcgcggtcggcgagcccaagaagagatgttgccggaaagccaggtagtctcctcggacaatcaatcgacacagtggctggaagtgttctgctaacccttgtgcttctggtcgttggagaagtgcctgggacgggaatcggcccaagataatgttacacggaatgaggtatgagaggatcaagcgtcgttggcttatggcttggcggtggcattggtcgtaggcggcctgtaaagcgaggcgggcgggggaaaagaggttattggcgaaaaggtagcgcccgaggtagtagaggtaggttacacgctgtgaagctgggaagtaggccaaggggggtgattgggcgctgatacttgcaaacatctgctcggcgttgcgtagtttgccgcactatatttcgtcagaatcaagatctgaaagagggtgagatagtcagtgatagagcctccgtacctggaacagcagtttcaggcagagattagccatgagatagataccgatgcgcttgccctccggcttaccagtagggccgggagtgccggtccgatcagtgaggcacttgatgaaggcttcgcgcaccacattggccgatttttccaccaaggtcactttctcgatgctctcgtcctgagccgccagaccttccattcgtcgaatatgcgcgatcaggtccggtcgacgatcgaggcccattgctaattttgccagcaccttcgacaagtagagaactgtaggaagaacgacgacacccatttgactatctccgagggcgagcacacattgactgcagttgatgagaaggttgagtcagctttcaagctcgaagatatgagtaggatcctcgtccggggaacagagagtgcattcagaatcctccaccggggggcagcaaaacttacttgagcagcgccttcaactggttgtatgtttccaataggttatcggtgttcatatcgcgtagaaagatcaggtagagcttggcgaaagtcgggaacgccgtccatgagccacccttggatcgcggcacgagaggctcgcatcgttgaagaagttcggtgtcagccttggagcccggggcatagtactgccgtagttcactgaccatgcgctggtaaatgtcagaaagcggcggctcgagctgaagaaagtcctggactttggcaccatcgcggttctggaccaattcctgcaaactgccgaggaattggtcgaggacgggagtttgacccatgttgaaagagcgaaatgctcgattggctggtatctccagaagttttaatttaattgaacgatcattgtgttttcaaagattcttaacggtcaaagaaaccaaaccgaggagctcatctattgacggcatggcagaacccgtcaccgccctttgtatagacatgcatggatgtccaggagcgggacccgattcaattttcaattgcattcaattatgctaggtcattgagtgttttgataagatgaaatcaatggatcactgttaatgatagttctggtatagttcaaatgggttggtgtctagaagtaagcacttcactcagattgtatatatctacatatctatagagtaatactctagtataagcgtacaatatgcacccttgcaacataaagatggtgtattatgtccatgcaatttataggtcataggtagtattatcatgtactcttgaatgtgattgatatggtttgaatcacagataatgattatcttgtcatttaataggcgtaggtatcccaaacggatgatgtatatagccctcggagaggggatattcaaatatcgtcttacgatcacacaagtccctctggattacttatagtcaaagtacatacaacatatgctatgtttttgattcctgtcaaaattataggtgcactatgtatgtacccagtacgatattgtaaatattgtaaatcacaccttgttaaagtcgatattggtcgaacgggcagcaatttcacatgaaacttccttggagacctttagagtcaatcaagcaagtccatagatgatgttatagtataattatagtataatatcatatgttatagtacgtgctagatgtctcctctcttcccagacaggtttcctcctatgatgtcatctaactgtacccatatcacatgtaaaaggtaacgtcacagggaattggaagtacaaatattctcaatgttgattcttttctttcttaattgttccaattcctcatttaacaaaaatcatgggttctgagtccattatcttggcgctctcggccttcatccggcatccattcgtagagacctttacctggctctacttggctatgcaagcggtgttggtttacgtcttttcgcctatacccccgccccctaccgctcagaatgcaaatcttcctagaaagagagtcgcagtcattggcgcaggcttgaccggtgtgtcatcggctgcccactgcgttggcaatggcttcgatgtccaattgttcgaatcgagacccaaagaacagggattgggaggcatctggagtgtcagttctactttgcctttagttaaagcacttctactaatacccttatagagagtcaattccacctccgcactacaagtccacagcgtcatgtaccgtttccatccttccgtccggttcgacagcgcgtatcccacccagcagcagatcaaagagcaaatcgttgatgtctggaagagatatgacctggaaagacgcacggtctttgagactaaagtcaaatctgtgaaaaagaccaagaatggccagtggatcatcaacaatgacgaagagcagtatggccgcttcgacggcatcttggccacagtgggcgtttgtggagatcctaagatgccaccgctgcctagccaggaaagattcaagggccaaatctaccactcctctgggaggcggcgctagcgccattgaagctttggagttcgccgtcaagaacggagctgccgagattgacgttctttctcgctccgataaatggatcatcccccgcaacatactcgtgcagtctctgctagcgtgcaatatcttcggccaggaaacctcactctcgtggatccccgaatggttgctgcgcaagtttttctatcgtgatcttcaagacattgcgccgtcagacaaaggaatctttaccggaactccgatggccaatgacgagttgtttaaccagatccgcgagggcaaagctcactggctacggggtgacatcgtttctgtggaagagaagggtgtgatgttcaattatcgatccaagggtgtccctaagggaggacctggccacgagaaattggttgagggagatattatcgtcatggcaactggttttaaacggccttcactgacctttttgcccgatgagtgtttcgatgaaccctacggtccgcctagttggtatcttcaagtcttcccacccaagtacccggatatttgcgcaaacaacagcacctacgtcgatgcgattggtacagtgggcaatatgcatattggaatatacacgcgattcctgcttatgttcttgaccgacccattgaccagacctactgaagggtggatgaagacctggatcgacttcactaggttcatgaagcgtctggcacccacgggagcatttgacttcttcacctatgctgaactgatctactggtacttcttcgtccttgtcgtcaacccgttccgctggaagtgggcgttgttcgtgttctttggtattggtcgtggcttgcccttgaggttcgtggaacaagagaactcgttccgcagggagctgaaaaaacaacgcaagtcaaagaaagctcagtagactggcttaatatgatacttgcccaatgttacgggggatgcatgtacagtggaagttaagaaggtcatcataattgaaacgtgatactttattcgtcattatggcctggaagactagtgttaaaaaaacatatgtattgtatgtatatcaagacatagcgcttaaattcaacgatatccacctgaagattgaaaatttcctcccattattgccctttgatttctggaatcttcttccccatgtcgtaggccaaattgccccctcgcaaaaagtgagcagggatataatgctgctcttccagccacagtataggccatagcaaagtcacacccaggagacagaaaagggttgcaatgagatgccaaccaaaaataatccaatacccgatatgcggcatgaggaacttgacgaactctgatgtttgatacagatcttcttgcttagaaatatagtaaagcttgtggtcgccattggtcgtagtatcgctcttgtccgaatcgtacgtcaggtccaagaccgtagtaagagtcaccggagcaacgtggaatggaacaagccaaatggaaaagatctgtgacatattcacatagagcttgagcttatcctcatcaaatgctggaggatggtcagagtttgttgtcaaaattatgctgtccatgaccttgaggagtccgtaccaattgaatgaatctctaactcgatccggggtgacatgatcttataccattggaatatctttgagacccaccatctgctaccttcaaagttgggcactcggcagaatgggtgaacaaatgatgcattgttggtgaaataccgcttgaggacggtttcttgtaaagacggcgtggactgtgtcagactccggataacggttggtatatcggccactatagggatgagcaggagataaatatatatgaaatcgaattgacaacgcacctgggttttccattgtgatcaaaaagcttcaacggtgttggaaagaaaagaaacgaaagatatcgagagttggtcctgagggacacaatgacgtcatctgggcctatcctcggggtttaacatgtgaactgcatttgggcctagtcacagcaagttggaagctatccagttgaataccttcttcttaaataagtgatttctttcgatcgataccacatgctctgtggaggccatatcgagcatcatatttttgctactccggaaggagcttgccagatgccggtgtttatcggcatgccgagtcattatattccggcggtaaggtataaaatatacacatacacatacacatacacatacacatacacagccctagaccaaattgatccggtggaattatatcctcgaatgtatgtcgtagaatctagatacaggtatgcattggtcaaaatggaccttgggtaatcaagtaaactccaaagtgattgaattccagaaagaaacgcctttgaacatggaggttgcccgctgcaaccactttttaccgcttccagctgtcaaccttctttcgtcgcttgtcgaagatctgacccatgccaacaccatcaccgcgttgcccgtcctcgttgcggactcgcttccgactcttctcgagtgcggctccattgcttttgcttctccgggtgagacgttcaatgttatctgcgccctcattgagccccttccattcatcaccaccgtacgtggtatcctttccacgaccccgtttggccaattccttcttagtctccttcggcaatcggacgaagttggtctcttcgtaggtggtacgctctgcctcgcgctctcggtccttctttgacttaaccgttcggccaccatcaatgattgtgctgccgatactgggctcagccatgggtgcggaggacatttcagcgctaacaaattcgtcgatgacgttggatcggatcggtctgcggtcctggcgttcgcgacgttccgtcgtaggcaaggaagttggcatgatcctcgggggacgataaatgccatccccgggtccttcgacggcacccttggagggttgggccttcttctgctcggccactcccctggagaaggcagaaacattaggtcggtacgccatttcatcaatgtcctcttcctcctcgctgccgctcgcatcttcgtcctcatccgatgaggcttcgctgcctgatgtcgcggctttgcggcttttcttggtcttgaccggctgaaccttctctgcccgctccgcatcctctgcagccttaatgaccttatccacctgatacttcaatcgtccttccaaaggacggacaccacgttcgaggaatacgcgaagctcaatcaatttcttgcgaatatcatcttcgagggagttgtccgtagattgactgttccctttcggagtttgtttcgccgacacatttcgcagttggaaaatgatcaggaacacaagattttgcaagtaggagaggagaatttcgctcttggtgtcgaggagagatatgccgtcttggggaggctcgatcgtgacatcggaaggcacatccttgtgtggcttgggtagagaggaggcagttgtcgacagacaagtattcagagtctcaagtaatgtcgataggctttgagggcgtgcaggcgcctgtgctgaagccatgattgagagtcgatgacttgtagagaacaatagttcgcgaacaaaaaaaattggccgcttcgacgataacaccagtcacgtgtgataataataaggcaccaaggcactaacaagacatccttagatcgtcattgccagtctgtcactcgcagtttggtattttggcactttacctccttcgagtatcgcgagtttctcacagatgagaaccgtggttctcgctttctagggtagcttcttgctgtgaacaaccccccgttttctttcacgatcgcccaccgatacccaagctctactcctatcctcccaaacaaacaattgaggttgattccaggcttccaaattctatagagacacccaacatgcggttcaccgatcgagcctttcttctttcctcgactctactagcaatcccttccttgactacggccttttatctgccaggtgttgcaccgacctcctacgacgaaggacaagcagttccgctttatgtcaaccacctcacccccagtctctcgcgagatgatcagcttcattcggtcttctcatttgactactaccatccggcttttgggttctgccgacctgcagacggtcctaaagatgtgagggaatccctggggagcattctattcggtgatcggatccgcacctcgccattcgagcttcacatggcaaagaacgagacgtgcaaatcgatatgtgcagaggcaaaatttgatgcccgcagcgcaaagtggaccaatcggcgaatagctcagggctacaacatcaactggattgtggatgggctgccagccgcgcagttgaactatgatggtgttaccaagactaaattctacaaccccggtttctctctgggtgagctagatgacaatgggcaggctctgctcaacaatcactacgacattgtgattgattatcataaggtgggctttggcggcaaggataaataccgcgttgttggagtgcttgtccagcctgaatctcgcaaggactcccggaatttagaaggtggcgccgctgaatgtggtactccgggaaatggtcttacgctcaacgaggacggggagacaacagtcacctggacatatagtgtgtactggaaggagtcccccacagcctgggctacccggtgggataagtatcttcatgtctatgaccccaagatccactggttctcgctcatcaactcggccgtcttcgtggtttttctcgtcggtatggtcagcatgattctagtccgcgcactcaagaaggatattgctcgctataacaggcttgattcgttcaacctcgaggatttggacagcacttcggctgcgatcgaagacggagtccaggaggattctggctggaaattggtccatggcgacgtcttccggtgccccaagtctccgttgttgctgagtgtgatggttggcaatggtgcccagctatttatgatgaccggtgtgactgtcggtaggtagtctaactcacgctcttctcctcctaggtgctaatcttcccttgtagcatttgcgctgcttggcctcctctctccttccaaccgtggattcctggctactgccattctcctgatttccgcccttttcggtggtatcggcggttacgtgtcggcgcgagtgtataagacattcggaggcgacgcttggaggcgcaacattatcatgacacctctgttcattcctggcattgtatttggtactttcttcacgctgaatctctttgtttgggccaagggatccagcggtgccgtaccatttggaactatgttggcactggtcttgatctggtttgttatcagcgtgcccttgagcgtggcaggcagctggttgggattcaagcaatcggtactgttaaaattccaccccctatatccagacattcaagtgactaaccacacctttccaatagccgcttgagggtcgtaccaagaccaaccaaatccctcggcaggttcctccgatgtctggtagcctgcgcacaattccgtcgattctgctgaccggaattctccccttcggtgccatttttgtcgagctgtacttcattatgacctccctctggaccaacaagatctactacatgttcgggttcctgttcctctgctacggcctgatgattattacctctgcggctaccactgtcttgctggtgtatttcttgctgtgtgcagagaactaccggtggcactggcgcgcatttatgggtgcaggtatgaccgggggatatgtatttgtgaatgcgctcattttctgggcgacacgggtcagctttggtggattgacgggggcggtgctctatgtgggctattcggcgttgatcgccttcattgtgttcattctgactggtaggttcttgttcctgtgtcttccggatgggctttctttgctgacttttgtgcaggttccattggtttctttgccagttgggcattcatccaccgtatttatggctcaatcaaggtggactaaaggacttcctattgctgtttctcacattttagcctcgcattttggggtcttcacgagagaagacttcgcttctgtgtgtttttgtccttttatttcctcttccaaaagaaaaagcccccattgcttggagaggtctaccttgcagatagataaatgtgttttgatattgaggaatgaaagtccacggactagatgtatatacgcgataatgagattgtcttaatagaaaagtgccaagccccgggatgttctggacttccccgttctctcgccacctccatcttcaaccttctctatctttagaagtgtacttgtttattcttgttgcacttgtttcatcttacattgggaactcccttgcttagacttacctaggtacttcccactgggcacttagcatttaccagccacaactcagccacacccatcccgcctgtttctaccccgcgtcatcactccgagcccattgcaaggccctcactcccagatttggttggaacttggtcttgatactgttcgagagggatcattttgatcatgggaaagtcgtaagtttctactatcctgtcaccctctttgaaaatggcggtggaacggaccccgtgggtttcagattgcgcatcacctcgagggggaggaacaagccaggaccaaacccccccccggtaccttcgatctgaggtcatgatgaatatcacgcgacctgaattcagaggatccgcgttgaccccgtgttccgcagtcaatcaaagctttcgccaacgcagctcgatgagctgcaaagggcaacacatttcgataagaaggagctacaacaatggtacaaaggtatgcagatatgcagatatgagccacatatcggatacgaaaatgttaaagagtgatagctgatatgtggacatctctaggattcctcaaggactgcccgtccggtaccctgaccaaggaagaattccagaaaatctaccggcagttcttccccttcggtgacccgtcatcctttgccaattatgtctttcgcgttttcgactcggacaacagtggtatgatcgacttcaaggagtttatctgcgccctgtccgtgacttcgcggggcaagatggaggataagctggattgggcattccaattgtacgatattgatggcgatggaaaaatcacttatgacgaaatgctggccattgtcgaggcgatctataagatggtatgtacaatggggttttatgaagataggctctaataactaactggaatacaggttggatccatggtgaaactccctgaggacgaagataccccggagaagcgcgtacggaagatcttccggatgatggacaaggatgagaatggcagcctcgacatcgaggagttcaaagaaggcagcaaacgggacgaaactatcgtcagtgccttgtcgctttacgacggattggtttagattgttgcttgggcgaatactggcgcaatgtgaggcattctcttttggacgggcgaaggggatgcattgcatattctcttctcatattctctgtttctctagtttactttttttttattttttttttattttttggtccttgtcatcttttcgattaccccccatgtcttttgtatattttgagagtacaaccttccaaaggtcggtagtgaaagtgtacgtatacagtgtcttatcaacttagatttggactcttgactttgatcgaactgtgactgtctttcttccaaataaggaactatatcttaaggcagacccggaaactatgcgctgacttggatggggatcgaattcaatccattgtctcgtatataatagtatgtgacatcaaaatcactaaagccccgcatactaccagctcttctccattctatctggaattgatgtacaagggtatcgggaagacgcatgagccagtcctcggcatgggatctaatgtactggaaagagaaatgcaaggaaacatggggaagaaaaatatgtatcaaaatcacatcagaaacaagaaaaagcctgctgatcagatgatcaaggaagagacagaagaaactcgtgagacagcgtaaagaggaatcaatatagaccaatatcaggatcaaccacatgccagtgaaagaagcacgaattgcacgagatctggggtacacggcagacaaccatcaagcctcagaaagagttgtgcaagggacgagcagctttctgacagtgggctaggatcatcggcgatcaaaaaaccaactgctgcgcttcccggtcgcttcttgtgattgtatgcccgcgacgttcgcattcgccggcccgtcaccacctccgcgtaaaggcttcgcgatgcgtgaccccccaaagctaaaactcgcattcccatccatgctcggtaagccgcgggtagaaccttgcttcgctgcttcgaggcgttccttaacagcggtgagttgagcttcgaacctatcagggtagttagtatcgagtacactaagcaagatccaaaggaatgcatcaagacataccggtggttggcctgggtaagtttctcttggctctcctggagcagggcttccaggctggcaatgcgctcgtttcttgcaattaatttccgctccgcgattgccacctcctttttcaagctgctgttttgttccacgagttgacgctgtacatgggttaattgctcgaggttgcgctccaagaaggccatcttcttctgctgagcccggttgtttgaggatcggaggacgttgttgtactgctctcgtgcgtcgtccagggagatttccaactcgacaacacgttcacagcggttctgaaggtcacgcatgagagacttcttcatggcatcgaattcggtgatctgctgctgcaaagtcttgcttgcggcaccattggtggacgtccgggactgagtatcgacaagagattgtcgcaacttggtcaactcctcatccttgcgcaaaatgtcagaacgaagatcctctgccgctgcagtatcggcctccttctttgtcacataaacctgctctaaccgtcctcgaatctcttccacatcgccctcgcccaggttgcgcgtcaatagaccctcatactctcgttgaaggtcatccagtctcttttccaaatctgcacggcggctgtcctgcagctcgccaaagtcacttcggtcgttcacggtcagctcggcttgtcggatgaagccttgcgcctcgagaagattcgtgcgaaggtcaaggatgtcgtctggtgcaatgacttctccctcggagctgatttggtgtagagcatcgacgcgctggatgagatcctgcagcttgcgctcgttatcggagaacacatcaccaccgaggtcgaacccggccatcatcttagccatcttttcactcttcttcttttccttctcatcaagcgccgccgtggtctcctttgccctcattcggacatccagaagctgctgcttgacttcatctaactcgcctgtgagttctgaattggcctcccggaggccatccatcgtaatggtagcctccttgctctcatatgagaccttctcgagctgcatgcggagctcgttgacttctgtacccaagcgctcattatctttgccggttcgtgcgccattctccttcatagacctaagctcgtcgcgtgcctcgcggaggctgcgctccacgttgacaatgtgcgactccttctctgagagctggtcttggaattcattctcacggcgcaagaattcctcgcgctcatccttctccagtaccaggctaggagtgctggacctatctccaacccgtgaatctgggcgcggggtttctgaacgcgcagtctcctgtaaacgcgagggcgtacctggacgtggagcgcgggcttcagtcttcgcggcactgacaatttcgcttcctcgcgcgggggtccattggtccttggggacgctatcgccgctacgccacatgctgatttcgccctcaagcgctgaaatgtagctttcgaaattcgtcatttggctttgcgccttgcgcagcagcagcttcatctccgaggagctcagttctgcgttgaccttggccttattcttaatggccttggcgcgcacaccgaaacgcaaggttgagattgtttcggcatcgttgtagctgctgggcgaacagttgataatcaaggtcgtccgggagttaccaccgagggattcttggagaattcgagtgagtttggagtcacggtaaggaatgtgtgtcgatttgccgtcggtcagtgcgttgatgaccattcctagcgcacttaaactcttgttgatcttcttggcctcctccagagtctggccacttgcgccggtcttgccgaccttttcgctaccagctaaatcaaccaaaaacaattggccactcttggcggacccagtctcgacatttttctgggtgacagtgataacgaagatggagtgggagcgagaggattcctggttcatattggttgcagagacggcgcgtgctgctcctccccggcgcatgacttcgtagacctcctgcacgctggatacgtatacttccagcaatcctttgacgtaaaccccgcgagctttctcctcgtggactggtaagttgtcgttttgaggcacgagtaaatcacggatccgctccatgtaaatttccatatagctgacccgtacggtatactcgatgttgctcgggctagtcaggatgctggcgaagatttgctcgatcatgcgtggaatgatacctttccctatctcatcatcgatgtcggaacccatcatcgtatatgattttccggcaccagtctgaccataggcaaaaactgttccgttatatccgttcagaatatcatccacggtcggtcggatagagaagtcaaagatgtcgttttgcgcggtgtccataggaaacacccgatcaaaggtgaaggcccctgtgccctctcgggactagaatatttgtcagtatagccctcacagtttctgggttaagtttgggctcacgttgatgctgcatgactcttcattctcgaattcgacgatgggcttacccccagaggccaattcaaccttgttctgcggacggaaccttgcaaccactatatatatgcaatcagtaccagtcctagtaaaacgtactttggttcatagtgccagtctttgcatacccttgatggtgttcgaccccgcggacctgaggaaccatatcaattagtgatgacacacgtatgatacggcagagcatgtactcacgccatatttgtagagtgtgacttggatatgacacgcgcaagctagaagatagaccccgagaaggggtaggtgggcctcggagttcgtcagaggcgtttcaaatgggaactcgtctgttgcggtgtagtggctcggaggaggggtggttgaggatcaggggtccacgtgcaccgtggaccaaaacactcaaggaatgaaggaaaagacaaatcaacaaccaggccgcaaagaaaggacggccaatctaagaagacctacaacgggagtttgcaggggagggggttgacgcgaaagagtgggatttcaactgttgacactcaccccgtttgggcttaccgcccccggactcggatatgcaaccccctgcagataagcttaaggtatatgtagggaactatacaaggaaataattacatgtaggatatagttgtacctctggtttacttgcatgcccatttatattctctacaatgcatatatcaaagtaccggagagcaaggtttgcgggaaacaggctaatacactaaaaacaatgagactatgtaatattgtaaaactcgccggatatgacctcgcgaagtatgaagaaccatgaaactagagatctcgaaaaaagggaagaaaagaaaagaaaaggataaagataaaagatgagaaggaaataaagacgtcaaaaaaagggagaagaaagaatacacaacctgaatgaataagataccaagcgccagtaaccccatgctgtgcagaccaaacagccaagctgttgtgctcattcgtaagaatgtcaggccatcgaaattggctgagcatatttgatttgctcaattgtcctcccagcttttctcgaccgtctctcgcactcgcttggtgtactctttgcggttgtctttgtagaggttcgaggcctcaacgttggccggagatgaggtgttggggtcattcaaaagactagaatcgacaatctattagcatctgtatagcgatctttcataaccaagcccaccctacctttggatactagtaagaatagccgccacatcgtatgtcggactccagcggttctgcagaatatcaagacagagctcgccagttccatacacattgggatggaacatttggcttataaatttcacgcccgggggcttgttggggtattgttcttcgaagttcatgaccaggcggaatgtgccatcttcgaacggcgtgtcggcggggccgatgatgacggcattcctgacatttcatcagaaccattgccaagaacaagaacttcaaagcataatgcggaagaaacataccatgtcatgacattatcagcgactggagatgcagagacgccagctggaggatcggtttgcatgcgctgcaagtatggaaatgttagcggaggcgaatcatcttggacacagaacaccgaggaaaaagttaaaaagcaaattagacgcaacggcaatatatggatggcttcaaatgagaccatttatggatattgcagagaattcataaaccaaggcgaggtgatgatattgacgcgtaccttgaagtcccgcataagacgacggcgggcggatgtagacatgacagaacaatcggggaaggcgtaaagtgattaaaatgggttgctaaagccgcgtgtatgtagctgcggataggtctttgcaagggcagccaggagagaaggaaatagaggagaggggaaggagaggaaacctgaaaggtcattgatacggtaggctatatgcagcgaagcgatggagggggagatcggaagaaatatcccaatggagaaataaaccgaaaggggttagaccgaagttgagagagctccggctccggggagctcctgactcagcgtttattatgtcatcgatggataccgcccgggcggggccacggcgaccgccttggggaccgccttgggacctcggttcaagcggagtggcggttataggcggttatacgggcggatgaatcccgataagcacatgcatgagcattcctcagctcttcgtccttaactctcatctcataactcttctactcttcaatactgtcaaattaccagtcacttctatcttgaatataccatgatttccccaggcttgtctgctcgtctccccaagcgggcattccccgcatttcgcgcccagcgacagttcagctccgcacgcccgacttgtaaggagattcaggaagcttacattttgagtgcgtctcggacaccgacagcaaaggtatgtgtacctcgataaatgtcttgaggagtaatttactaacttccggttgaccagttcaatggttcctttgcttccgtatcagcacctgagctcggcgctgttgcaatcaaatccgccctagataaatctaaggtaccggttgagaagattacggatgtatatatgggaaatgtgttgcagggttcagtaggccaggcgcccgcccgtcaggcctctatttttgccggtctcccttccactatcgaagctacaacaatcaacaaggtctgcgcttctggcttgaaggctgtggcacttgccgcacaaaacattcaacttggcctagcagaagcacaggtggctggtggtatggagaacatgactcgtgtcccttattatatggcacgtgctagccaattgcccccctttggtgagattaagctagaggatggtctcatcaaggatggtctatgggatgtttacaacaagttccacatgggtatctgcgccgaacatactgcgaagaattatgacatctcccgggaggaccaggatttatatgccattcagtcatatgagcgggcccaggaggcatggaaggagagcaagtttgccgatgaaattgccgcagttactgtgaaaggtaagaaaggagataccattgtcgaacgggatgaaggcttcgaaaacctgcgtgccgataagttgaagaccctgaaacccgccttcctacgagatgggactggtaccgtaaccgctggcaacgcatctaccatgaatgatggagcatctgctctaatcctgggcagcaaagatctcgctcgcgaatatggcgttggcagccgtgtcttggcccgtatcgtttctacagccgatgccgccatcgaccctgtcgacttcccagtggcccctgccaaagcagtcccgattgcgctggaacgtgccggtatcaccaaggatcaagtggcggtatgggaattcaacgaggctttcgcagctgtcatcaaagccaatgaaaaggtcagtaccgtatttgtctcacttccacatcagatctaactcgcctagattctcggtttgcaaaacgcccaagtcaacatgctcggaggcgctatctctctcggccacgctcttggcagctcaggctcgcgtattctcgtcaccttgctccaccaattacagcccggcgagtatggagtggctgcgatctgcaacggcggtggtgctgcgactgcgatggttgtgcagagattggatcgggtggattgattccaccaaaaatagtgcactgtctccggtggcatgttatgactgatacactcaaatgggcaatgcgagcttggatatcatcccgtgtagcaggaacgtgtacatatgtaccttttctgctatttggaatagcaggttggccgaattctatatatttacttggagcttttgctttggaggttcttttttgtataaactcttggcgtgcttttttccagcctttctatggaaatacatagttagtgtgcatcgccctctggccctctcgccctcttttctccttttcctctcttaggttgactacatatcttcacaaggcctttaatatatacttccctattagtctcatcttacaatcattttcgctaatcgcccgtttcgcaactcaaaaatgatcctcgaagtagttaactagttagctagttgttattcttcgggtctcttgttgttgcctgattcttcaggaatcaaccgagcagaatgcgaccccaagcaaaagcagacctctggcttctcttcttcatatatcttcatattgcaactcgcgatccctttatttaccaataatgtcggcgtagcaaagatccattatatgacgccatgttgaaccctgtggccctatcattatctccatcctgtcatgacgccatttcttggtccacggacggcgagcttgctatcgctgcgggtgaatactttcaaatcctggtatgtatctaattatctgatgggttaaaaagtaactgacgttttgacagacacccaaaaaaggcagggatgaggagtctgcccccaactcaacccaagattggctcatgactcgtgttagagccaacttgtttacgaactctgaatggccgacctatcttccggggaatcgagatgagttttcggtcgctgcagacctttcagaaagcaatgtcgtgggtctggcttggtcaccagcaggactaggcaaataccgacgtagtgtcctggccgtgctgacatcgaatctggtactgtcgctctgggagcccattggccttaagaagcaatggactagggttgccgtcgccaatcatgtattttggtcacagcttcagccatcgcaggacccaaatagccatggctttcggaaggttaacattcggtctttcacctggtgcgagtctttgaagccttcaacgccttctgcaggctcttcctttccacattcccacgaaagtcgctggggaattccactgctaacggtggtgaatgacttcaatgaagtcatgctggtgcgggtccgcagatcagacccaacgaatagcccttccaagccttatgatcttcagattctggcgcgtcactctctgaagaacccagaaacggaggaaagtccgttatgctctggatcgctctttgggaaggaaatcaaagacagacaacgtactactgcgctttcctgtggtccgtggcagatttcacccgcgacgcgcccaggcaactttggctgcgcagtcgccatgatagctgctgtatgcggaacgcagcttcggctaatgaaactcgaagtcagtctggaaagctcgctcggggaaacctcacaacagtacacgttagtcacagatttgatagagcatcctttggaccagttgaatgaggaatgggcgtatcacaacattgctggtccccttagatggctccataccgtacgctcaatctcttatacccatgctaaaatgggccgtttcgctaataaaaacccactagagatcatccacaaccattgctctggtagcgggcgccatggcaggttttatcgccatatccatgccccacgctacgtacacgggtagcgttaccaattctgatgccttcggattccgcgattaccctgtccatgagccagagactgaggacaacaaggcccaccaagcaaggcacctagagccgatttctggtatgatatacaatatctacaaggcctttcagcaccgctgacccactatagcaatgctcacttccacgagtgaacaaggcgacaaatgtaaactccaaataggtacactcggtggcattggtttagttgcagaacttcaccaacttccaagtgacggcgctctgcaacagccacaatggaaacgcatgattgaagaattccaggatgactatgacttggaacacgacttagggggaatgtcagtctcgaggatttggggactcgcagcctatcgcaacatgactgcggctatcttcacttcacatcccacggacatgatcgagtatcgcatcacctctgatgacaggtctatgattgtcttttcacaggagggtgaacccacgagagacacacaaaccctgtttgacgcgcgcatgcccgatggtcaaccctccgacctcatccagactggagaagtgatacgtttcgtgctacctggtgaagatggcaatattgaacctgacacggagagccaacgcctgatttatgccgttgcctgtcgtgccattgtgggtgaagaggacaagtcacttcgacttcaggcgcggcggtctctagagcgtctggcagtagtagcaggcgcggatctgagggatgagatttctaaatgcgacggccatcctgcccctatatctgcgagatctatagatcaagtcactggcccaggcggtcacatttacgagaagtgcgaagtttgtgatgcgggaattgggtggccctcggcccagttggcgcagtgcgctaatggccatatttggggtaagttaccttgtggttcaaatttgctagtaacatgttgacatttttccgtcatatagaacgatgcggattgtccttccttgccattcaagagcctggggtatccaagtattgttctgtctgtcgcaaagaagccctcgacgaagagcttgtggcatgcatgcgtgagggaaaacaaggtcgggcattcgatgctctctttgagacgttcgatatctgcttgcactgcgcagcaaaattccaggccagttactagatgtccttgaatagcacttgcaatgataacagaatgtctccttgacggctagcggctgcagaaaggacgaaatccgtatttacctgaaaatgtaatacgattattgcatataacgattccaaaggatactcatatccacgtcattagagtgagctatctatgtcagtccaataagggaccccgcgataggattccattcgtcgtcccatcgccgagagctctctttttgggcgcctaggcgaagactctccaatttgtcgctcttaccgaacagctcgacaaggtgcccagccaactccttcgaacttccaaagcccaacccattaacaccctcagtgactaactcgggccatgcttcgaaacgatcccatccaacaacagggaggccagccccgaacatatctacaaccttcatggggagatctaccccactgctgctagtatggagactgacccctagagatgcggatgccaatagccgggcatattctggtacactcagccacgcagttcgaattgtgactttctgtagcttgctggccttttcaagagcggcaatctggcccaaatacatttccttttgtgggcccttccctgtaatgatggccaaaacctcagggaggtgaggttgcactgtcgtggctagttcagagtaccgaagaagtgcatcgatgaggaccgagaaatcttcatccgcggtccatgaggttgagctgaccagaacccggagagatcctgctttcaaagcagaatggaattctttagtttccggtaatgttgtgaggaaatccgtccgtgcattgggatcgaggataggattgaaatggctggcagggcggtcgtgtagtggcaggacagggactggaaggttgaaatccttcttgagaacggatgccatggcattggtgacgcaaaaatgagccgaagcagatttgcaaaataccttctcataccacatcgacattttcaccaagggatgggtttggccgagcttcaacgcgagtatggaatatccaaaattatgccaatcaataatcagccttgtttgccgcaagaaacaaacaagagacgctatagccagtgtaggaatagaaggcgggttctttttattattgcaagagcgagtcagcacatcgaatgagtatcgaggaatatccttttcaggaacatacctgaaccaaaagccaccgggacggttttgtagtatatgcgagacacttccagagacaaacaatctggaatagcaccttcaagggcccataaattgtaaatagaagcttgttactggtttgtaggagagcgggatgagagcgaagcggaacaatcgagatgctggggtgagatatgatatcaggatgaggatcggattctgtttcatatatggtagttagcgatcttatgttgcactctctgtcaagagatttatactgaccgttatacccaataattaccacctccccgccatgtttcgcaatactcaatgcatgatactgcatgcgcgggcttcggccaatgtcgccaagaacgaggatttggacacatgtcttgtgcctttttgcggcatgaggtcttgagggagaccctgcttgtgctggctgatattgcgaaggaagtaacaggatcaacacagtgagggcgctagacaggcagaacactatgctgataagggtctcgatcatgatggcaattgcacttcaaatgtttcactcatggtattgatcagcttccaatcacatagatagtcctttaaaagcaaaacagaaggtggaatatcagcagttcattgttgtgaatgcgtctgcggccccgttcgaaacatctggattcaatgttcgatacgtaatctgataaggcttcacgtgattccccttatgggaaccttggggaaagacgggcttttccccggagacagtggcgatctgtttaagcctgtgctggcactcactttcccaattatattattccctttgcttatcctccccgtgttattccgcaatgctgtatttgctgataatctgcccgctattctgacctcactcccgctccaccctcgatatcttggcagtgccccatctcctatcctgcctgctggacctcccagttgctgcgcatcgtcagcatctgaagatcatgtcgacgggggcaccgtcacccagtgtggatctcacacagtcctccaatgggcacaatcataatcatggtcatagtcgcagtcgtggccatcgatccaaccgctgggcgcaacctccacctccgctctcacaaccagctgatgccagcctccctgaacacccggaaccaatcaatgctgtgaactcgagctattcatatggacatacatcccaaacgtcaagccacagtcaccatacgcactcgcactcccactcgcactccagtacacaccacggtcataaccatagtgtgtcatctcttcacaatgatgtgctagatgaccaccatttgaaagatttcaccggcgtttatggaatgttatctacggataccactatacaggcagactatagttcagagaagatgtatgtgggctagagtgtggttgaggagtaaaagctgaccctaatttcagccacgagattttgactagtacactcatcgtgctgccgtgggttgtgttttcttggtaccagaggcaggatgtccaaagcccaaagctatccggcgaaggtatacctggtacgacagcaagtattcctatcggacaagttggtcaaaagacctgccttttgacagcgatcaccctcaccctcttcggctttggtcaaattatacggaccaaccaccaaaaggctggctcattcacactagcttccgttaatttgccgaaactaaatgtgaagagtgtccaagcctcgttttcacaaattacctccgtggcactgccaatatttgcagcacttcagctcggaggctttttggttgcatttgcgctgctcctcgcggcagcatcaggggtcccatccatcatcaacaaggcctcgcgtacccaagagaaatacagtcgaaagatcctatccgttgccctgctagtcacggttattgtatcgagtttccttgggctgaaccacccttgggacgtatctccagttattggatatgccgccttattaggatccgtgtttgttgcacctccccctttcccctcccttcgtcacaatggacctatccctgagccagggctcgttgctgcacagagcaaggcttcacgcccggtctactcctccgctgtggtcacaactgatgcaccactggccgttgtatccgggtgctcccttgcacttctgaccatccttttcaaccgaggatttgccttcagcgtctcggaactggtttatctccttattcctacggggatccttgctacttctcttatgatttccctgccctctagcctccgctcccccaaaaagaccggacttgccatttgcgccggagccgcagctttcctttgttccccacatgcccaggatgacttgctcatggtttatgccacacgtggtatcttggccacggcctctttcttcgcttctcgaagggatgatatgcatttgcatctggatgcgcatgtgcataaccacactcacagccattcacgttcacatactacatccgaatcctcccaagtatcaaagtggcttcttcacaaaagcgaaccgtacccgttgctgtatagcattctcaaggagaaggattcccgtagcatcttctactttatgtggtaagttatgaaatctaaaagccatcattcttggcttgccgctaacattttgcagcctgaatttcacttttatgcttgttcaattatcatatgggttcctgactggatcactgggactgcttagtgacagcattcacatgtttttcgattgtcttgcgcttgttgttggtttatgtgccgccgttatgagcaagtggcccccgaacgctcgattcccctacggctatggcaaagttgatactttgtcaggatttgctaatgggattttccttatgtgagtcttatcaaagcggcggggggtgccaaattctaacaatatacaggattatcagcgtggagatcatttatgaagcggtggaacgcctctcatcggggagtgagatgcatcgtcttggtgagctattgatcgtcagcattgctggccttgcagtcaacttggtcggaatcttcagcttcgagcacggtcatgctcatcacggccatgatcacggtcacgatcattcccatggcaatgagaatatgcacggcatcttcttgcacattcttgccgatacgcttggttcagtggcggtggtcatttcaaccattctcgtccattactccggttgggccggctacgacccattggcatcatgcttcatcgccatattgatcttcgcctcggccgttcctttagttagcagcacggccaagacactgctactcactatgccagccgacactgaatataatctccgggaaacactagcgggagtcagcactttgagaggtgtggttagttatacggtacccaagttctggctcgatgatacgggagcggtgtcttccgggcatagtcattcccatggtgagcatcaccatggtcatagccatagccaacaccatcatggtcatgatcatgaaccacaccacgaccacgaccacgaccaccatgatcacacccaccatgaccatgatcacgatcataatcacgaacatggacatgagaaaaattcccagaacattttcggggtgatccacgttgtcgcttctcggggcgcagatttggaagatgtacgtcagcggaccgtcgacttccttcgagagaaaaacatggatactctcgtccaagttgagcgtgacggagatgcacgctgctggtgtagtggcggaaacaagggcttttgattagtgaaaactatgtttcgcccatcaactactctcaaaagagagccaagatttacggtgcgtttaatatcgctttgccccgatgtctgtatctctcttgtacagataggattggatcggttcgccgaagcattacaccaatcaacagcacatagttttctccacggcgttcataggaagtggaaagcatatacttcgatttcaattacgaaagtcctttattgcatcacatgtaggcgacatttatctttttcagggggtgagacttgtacaacccatttctcgacaaccgtttctcggtcatggccccgaatggccccgaatggatatgcttgctcggcgccctacatttctcaggcaaatggggtgcagccctgtcggtgtctcttgggccagatctccatgaattgcgacaagatgctcattcgggtcacacaatcacattgaacctcggcacatggaaagtccaggtctacctgttgtgctattccaacaagacccgttctatcttggaggttcccaccctcggacaacttgaggccactggcaacttgtcgggctacagctctagaaaaataacctccagcatctaaaagtgtacatttggacaaatgtaagagtgacattggatcctgccctaccactggacttccagggtccaaaggatgttacggctatataccttccgacattatcccaacagccattctttcgtgtcatttgcctaatgcctctatagagacattgactactccctacccccgaatatcctgcccagactattcaatgtcatcaacttctgcaaaagcaacatatgccgacgaagtcgtgcgaggaggatatgcgaagatattcgagggccatacagcctttctcaccggagcgactggttgcttgggaggttgtctcctgtacaagctagctttgcaactaccaactcgcaaggttttcgccttggttcgagggaactcccagcaggctattagaaagttgagagaatcgatgccaaatcatgcacaggctattttatccacggggaaagtcgagtttgtgattggagatatgaaaacggtgaactttggtattgaaactgctatccttcgacaacttcaagatcaagtgacgctggtcattcatgcagcagcgaaaatcaagctcgaaggtcccattcgtgatgcactcgaaagcaattgcctccctgcgttggaaatggcacgaattgcctcggaattccggcgcctgaaactcttcatccagatctctacatcatacgtcaatagtcatcttcccgatggcacagttttagagcggatataccccttgggaggtgaagaagatccagaggaagagctggcatccgtcttgacgctcggcacatcaccgcacgacggcaaattttcgtctacctacacccaggccaagcatctaatggaacgtctactgctcagtcgctttcctcgtcttccaattctactgcttcggccaacaatcttcggtcctgcgttcagacacccctactcgctatatggatccgaggactccacgcctctcaccaaatttactaggctctggttctccgatcggggtagcacacaagtttggcatgccacagaaggctataaaacaggcaccaatatcctggacgagatccccgttgacctcgtagcaaacgcatgtctattacatgccgcagcacgaacgacgggcattgtccaggttggttcccagctctatcactcgtttaccttcgacgatgtcttccgaatcggcctagagaactcgacgcctgcagctcaacgagattttccaaaaatcgtcttcaccgaagatcgcagcacaccacagtgcttccttgctgagttgattcaagtaggaactcgtaactggttgttcgattgcggacgatcctactggctcaagcaggtgagcgggccattgagcatgcaggtgtgcaagcatgaggcagatgctctaaatttgatacggactcacgatgtcctcgggcctagaaaggagaaagctcggatatgaaaaatgagtcacagtgagactggagagtgcagactggccagaatactcgtaaccttcgtgattttcgaaataaatgagaaatatgagcttcgtatagtccgccggtgctacgccttatcataatataccttcctaaatttatctttagtgggttcatcctagagaggggaaaccctcttgatggtagtagtcagttcaaataagctgagtctacattgcattaactgtaggtccacccgtggggggaacatggggtggtttttgatacaaggactggcccgagtcgacccaaggcaatgaagtaatgctcggcaagtaaagaagtgaacagaagtctcagacaaacccgcaataacagtaacaaacctgagctaaatcgaaaattatccgctcggactgactactagcctgcttcgaccagcgattttggaggctaaaacaacaagagactcagcagccaacagctcaaagataggaacgacgctctccatctcctttgaaagccaatttctgaactcaagcgaagctcatatcgcggggtacaagatgcgttcttccgccatcccaaatcgatccatgatgaaactttttttcttcgcgttgcccacggtgacaaagatgtccgcgacaggcagctggctcatttcgacgaaggcctgacccgacccacctgtggcggcgtggatcaagatggtctcgcctctgcgtaggggcgcgatattgtttcatgagtggtagcgcggccgctgtctcgaaggacataaaatcgggaatgcgtgccgccagcctagcgtccagccgtaacctcgtacagaaggaccctgaactcaagcgcatggcccgatccccaacccgaagaccgtgagggtcaatcacgacgtcaccagccacagccgaaacgattccactgcactcacaacccaggtcatttgcctggatctgacccatggccatcatgacgtccttgaaattgatacccgccgccttgacctcgacctcgaccttcccattctccagatgacgagcagtacgctcgtctggcgcgaagtgaagactgtccagcagtccaggcgtatccacaagaccagagcagcccactttgtccagccgctgtagtgatggtgtcgccttggaccctcgcgtcctacttccagactgcagattctccctagcaccgacgtcctcgactagccgcggtactcgaagaacgtcattccgctcaataaaacctgattccataacctcgttgccactggcgcttgcaaatatatagactatatcagcagagagtatgatcttattcttaatcagaatcaaatatgaaggaacttggggaaggttcgagcccaaaaggatcaccacctatttttctaggttctgtaagctcaacattgcaaaataacgccctcgtcttcgtatgagctcagcgtgtgtcccggactcggtgatcacaccgtcctctaggaagcagatgaggtccgcattccggacagcactcaagcgatgggcaatcgcaactgtcgtgcgctgctttgcagcttggtctagcgcagcctggacgacactttgggattccgaatccagcgctgaagtgacttcatctagtaacaagacactgggccgtctcagaagggcccgcgcaattgctagtcgctgtttctggccaccggaaaagttgtttcctttccctccacacatcgtattgaacccgagactgtatgatcaagtcagttgctgctagtgatggttatttggtggatgacctacggcagcgaacggataaaatcaagtatatttgcatccttgcagatgatctccaattcttcctgagaatactttgatgcatcgagtccgaggagcagattatctcggatggtgccctggaagagtgtgggctcttgatccacgagtgccacttgattgcggtaggcgctcatatccattgaggagagatccaggccgtccattgtgacaataccggccagtgggtggtagaaacgctctaaaagtgcaacaatggtgcttttcccgcatccactgggtccaactagggcgatgtatttacccttgtgtacagtgagatcgagaccttttagtatttgccggtcggggcgcgtaggatacgaaaagtggacattccggaattcaatggtcccctgcaaaagagttgcaggttcgacaaagtccaatgggcgctgtggttgtcgatccaatagccctttaagtcgggtggccgaaagttttgcctttgctaaatctggcgagctgctaaatatcgagccagcagcatcaccacaaatgttaacggcagcaaaactcaggatgaactggaacaatccatactccccactgataacgagggtgccaccataccataagccaagggcagtacacaacaagggtgccgattgcgaaaacgcaaaaaggcccgaagatgtcaggcttgagcgaatgctcttcgagtcttgttcggctagcttatggtgaaatactcttgcaacctcggactcacggttcagagataagacggtgcggatggccgagaccgcttcactggccaatgatgctgtttcttgatacacttggcgaagatgggcctcaagctgagccatgacgcggaatcgaagaaatccacacatcaaaagaacaggtactgtagctgcaccgacaaggccaagtttccatccgacagccatgctggttgcgatggcaccgatgagagttgtcagtgccatgatgtaattcccaatcgcgtagcaacccatgcctgccatactggctggctcagtgccgagaaatgacaccaatgcgcccacaccgtgctcctccatgtcaaagaaagacatgtctgtctcgagaagggcccggaaggaaaggtcaccgagacgacggataagcctctctgtgcattttccgagagcagaagcttgagccgagtaggcgaagaactgcacgaaagccaggacaacatgcattccagcccatagatttgtctcagaccgaagctgcggggattcagtgggaggtctggcgagtgccacaagacatttggccagaaagactgcctggacgggtgctccagctcctgtttggattgaagcgagaaagcccattgacaccagttttatagagtccttgtgaaaactattcacaaacctcagaagggtctgcattgaatactgatggggtggccgatccagactcgcgagagcatctgcgcccttacgcactgtgtcaaacaaaggacctccacttccgacaagcggcggagcctccttttctgactctacagaaacagacttagcatgagggatgggaacccccaaagaatcatcatcgtcgggaggtttcttctcgctcaggttgacagcctgtgatttggccagtcgactataaactccattgagacgttgaagaaagtcatggttgccttgttcgataagctgacctccagacaagacaataatcttatccgcggatttgacagtcgacaaacgatgagctacaacaatggtcgttctcccttgagatgctttctcgattgcagcttgaacaatggattcactcatcgagtccaaggctgaggtagcttcatcaaggagaagtattcgaggatcggaaatgagggcgcgagcaatagcaatgcgctgtttctggccgccggaaagcaacacgccggcctcgccgacaagggtatcgtagccgtcaggtaacttggtgataaagtcgtgggcattcgcgaggcgagtggcaccgtaaacaatattctcgatattttccctggatgcattttcatcgggcgttccaaccaggccataccggatattctcgaagatagtcgtagcaaacaatgtgggtgactgttggaccagcgagatttgctgtctcagccaatttgggctcaactctgagagtttatgaccgtccaagagaatatcgccggaaacggggtcatagaaacgctcgagaagttcgattatagtactttttccggacccagatggtccaacaatggctgtcgtttttcctggctcaatatccaagcttaggttgtccaaaacaacgatatctggtcttgaagggtaaatgtgtctcacattttgcaactcaatatgaccgagcacgctgtctagacttccctccgaaaaccgattggcggtccctgaaggccttcgatcaatggtgctgtatagtcttgatccagcagccgtggcaatagtaaatacttgaagtggagggacgatgccgccgaggcaggcgataccggtcactgtcgcgaggataattgtcaaaacatcgacgtacgatgatgtgcccgctactaggaagcgtgaacccatccagaaccctaagccgatagccaggtaaataacggcaaaaacagcaccgagcagggcgccagatatgagtctggcattatttgcaaagcgttcagctttagctagagagccatcgtatcgagccacaagctcagattgcgcattgagccccacgaccgttctgatggaggaaaagacctcttcgacaatggtaccagattctgcggtctctcccaaccattgctggcgatactttgtgagcattataccggcagctgcaaacactagggcgatgcatatgaggctggaggccaggatgagggtcaacctccaatctcgcatgaaacttatgacaaaagctgcgacaaccgatgcggagcactgtacggcgacgctgactttctctgaaataccgtctcgaatcagatttgcgtcggcagtgatacgagtggatatttctccggctccaatgttgtcgaagaaggcaatattttgactcagaagcgcggccaagtaccgttctctgatccgactcgataatatgatgccagtgcggatgaatccgatattcgcaatgtagcatgacactatttcgcccagaaaaagatatacgaagtaaattgtgaagcgcgtcaattcgctattggacctgtcttgggatggaccaccggaccagctggcttgtatgctgccaatcaataagcctgttaacagcgccggcattgttgtgattgccccggcgatggtcgcagcaagaaaggatacaccgataatgaaccaatctttcttggtcgcatatcggaagagttggagataattaatcttgattatgggggttgtgatttgctgggcgagtatttcctgctccgatatgcttgccatactgaaagagtcagaagtgaaagggtgaaggtggtgaacttggtgaacataacgagaaagaatccggagatgagcgaatatttgataaatcagtgatctgtcgcccccatctgccaagtgacagggatcccactaggctctcactttttgttacaaaagttacagtcacatacatatgctcttatgctcttatgctcttatagctgtcagggccttccattatagcctcacctatataaaaactgtataaagctacctacctaggtaggtatataccaaaggctatacatagaaaaagaccatttcacaaatcaaccctttttggcctttttctgctgtctacccaacaaactaaggagaatgtctatgtaaccagacattcaaaaagtctatcagagaagactacctgagaagatcagcctacggccgcatacacgacgattcttgtattagtcagactagattgccatgtctaatataagttgggtacatatatatatctagacaaagtccgcccgagaacaagcagaacattgaatagaccctccaagaactacaaaacgacgattatgcctctgtggaatgatggattagcggcatcttgtctgattctttcggtttttacttatatcaattatatattttcctgcattccatatctctatgatattgtaacaaccttggaaggcggcaaagggatctacctaaacggcgatcgtttgtttccttatataaattctaagcaggtatagtacatcagagtcccatctttttctgtggccaagctacagcgttggcccattcaatatcttcgggatgcaatgtatccaataattcagagactaatgcccgccccgaacctcgagcccaccaatgctgaccatcaagctccccaagcaacacaccccagtgcatgagaaccagcaatgctaaaggctgccggcgtcgcacattgtccacgaattccttgtcgatcatagcgagccaagccagaacgtttgcagggtcaacagaatcggccactctggttgagaagtgccgcaagtagacaatagcatctttgttgacctgatgctgatcggggtcgataccggcgagggtctcatcatttaaagtgccgagtcggtccagggcaacccgcgtgtcgctatctagacccgctgagccagcatcccaatagtttcttcgacgaaagagctctagtttcatccaagattgaccaatccggtggatttttctcacgccttgcaaaagttcaaatacgacgacgatattctctgttatgcttgaactttccccgcgggcagcagtgactcttggcagagcaatgcctataacagtggtgataatggactgcgccagcgcagcctcgcagttcagtggattgatgctgtcaacagctgcgcgatatggtgcaaatgtgagattgtgatattgaagtgcaacgtcaatgtacaccagcgatgccggtggctcaatggtggcggcaatatgaagagcccccagggccaaaatgccattcattaaaaagtcatactgaagagccagacgaggaatggcaatttgccagacgtgatgctccgagttggaagagcaaagactcctaaaagtttcggtagaaaacttgtgcataagctccagatctcgtacccctgaagtggttggagaaacggaagatgctaggctagggatcctagtccgcaggggacttgggtctattatagccaacggggccggggtctggctggtttgtgaatcgggccgaggcggcgctctaaaatatgtgcatgagagttctcgcgaaatacaattggagcacggtggccccttttcgtcacactgcggtcgttagtctcgttatttgatggagcccggatcaatctatggggccatcccgagtttccaaaactaaccttgacgcgacgtctcttgcactggtcgcagccttggcgggattttgtatgcgctctgcgaggaggcatctgggagacctcggtacgtgagagtccatataatcggttggctcggatcctttgagatgcggaagagaagaagataatacgaagggatcacgtgcaccggaactataaaaaaaaactattcacaacttgtcttgatttccctcttctgtatggttttgtcttttataatttctgccgtctacttcttcggatgattcccatttgacaatgactcttgaaacagccatggtcgcttcgcccccaagtcagtcgatatacccgtacactcagggatcattacatggtcacatgtgtcaacaaagccctagagaggatttgaaactatgaactcggtcccggtcgacattatacctaggttttatagattctagaaagaaaggaaaaagtctcggacaaaaatatctcgggccaaaagcaacaattctccgacaggaccaaagcgccttatagaaacaagtggatccgatgtaagcgacgtggagaaaacgagaacgagaacgagaacgacagcagtggacagcagtggacagccaatagcaatgcattttggggcagtttcatcctgtctaatccaatttagggctccacttgctggaacggtcgttgctgcggtcccttggcgtagtcctgcctgatagttgataatttatgatttgatatcaaattctcctgggatttctcggcgagactctagacagttctttttctcttgatctggttatcttgtcatctcactcctgggacttatcttcgctttctcaccccagctctttctcttattctccttccctctgctccatctctctttcctttcgtttacacgtatctcaccccaacatggcgagctacgctacttgctctgaagtaggcccacaatgtcccgttgaactcaccacttacggttattaccccaatttcggcggcaacatcttcttcatcgtcttctttggcttgctcggaatatgccaaaccggtctcggcgtctactacagaacatggacattcttgacggctctcctcgttggcacatttatggaaatggccgggtacattggcagggttctcatgcatgacaacccatggtccggacctgcattcaagctgcagatcgtgtgtctggtactcgcgccgacctttgtcgcggcgggtgtctacctgacattgaagcatatcattctgagcttgggagccgaacactcaatcttaaagccgcgccttttcacctggatcttcatcggatgcgacattggatctctcgttttgcaggccgcaggaggtggcgtcgctgcagctgctggaaatacgaactttgaactgctcaaagcaggcgacgacattatcatcgccggtatcgccttccaggttgccaccatgactgtatgtggattctttgctgtcgtgttcttctggagggtcttcaagcgcggtgatgggttttcgggagagaagaacctcgatttttcaccaattgttcccaagtggatgccgttcgtcgtgggcgctgaggtctttgcctatttcacagtcttgattcggtgtatctatcggtaagagccaatgtccgagtcaaataaggcactttactgacctcgatatctagtatcccggagatggctggcggctggggaaacccgctgatgcagaaggagaatgagttccttgtcttggatggaatgtaagtggcctcttggttcctttgaaagtcctggaggaagtcatagctgacatgtcattaggatgattgctctggcctgtctggccttcaccatcttccatcccggagtcttccttccatcgctgcgcttcgcgcccaagaaccgtgcttaaaacgctatgtctacttgtgatgctgcgttttggcgttgttttaagagatcatttcttccagtttgtttgtctatgctggaaacgatacttaatcagggtggaatcaataatctaagaatcaactgccactctacgactgtgccgaatttacgtcaaatattcaggagtttcctcgtaaatagatttgatcccaaaccagtgagacaaagatgtcaggaattaaactccagctctcatgaaaatcgcaaagaaatgcaccacaaaggaaccagagaaaccagagatcgagagcatggcaaagcattgctcgctctatgcaatcaagaagagaaccaccgctcaccacggtacattgaacaagaaagggaagaaaaagaaccccggcaaccccatgttaaatcagattataacccaccatcttaaattgccatgaataattaaaccgtgtttcagtcatccaatgtgagacggacacaccgacggacgcgcttcttaaactccgcagggtcctcacgccatagccgagcagcctccacattcgccgggctttcatcgttcgggctggaaagcatagaaatgacagacagcaggatcgtctcgggggtttgcacaggagaccagcgttccgaagccgactcatatccgtatttgtcctcctcgggtgggtgcaggatggaaatgcagacgtcgccattctcgtaaactatcgaatcacagtaattggtgagtgaattgtctatgaaagatcattcaataggaaccacatactattcggatggaagatgggggattcaaacttcatcttcggcggccggtgagggtattctggtgggaaagagagacgggctcggaagaaaccacctacgcaagcaaacttgtcagtattcttcaacacactttcgggcaggacaacgtatatccccaggcggcgttgtatttgccacagcaccagcccaggaatttgacgttggaccctgatatagcacaatcatcacatacctccatacagcttcacatcatctgatatcatgagcataacctcccattcgaaaacgttgttatcgaccaagccgcaactgattccggggatgtccttatcggactgcatctgctgcagttggcgggacagcatgcgcccggcaggtgaagtcgccatgctgataatcaggaaagagaaagcagaaagacagagatggaaaattctgtcgatatccgaagccgatttcaatgtcaaaaggaggacaaagaggagaagatgaggagaaggtgaggggcgcaaaaagaaatgaaggcggtaagactaaagcggggtttaaatagccaagatgggaaggcggtatgcaacatgggcacgtaatcggctactatctggagttgcagacctgatttttgaggaccttaggaatgccatgatgtttgaatctcgtaggtcataatgcaagttagactatcgtatggggcaaacattccgatctctcccagtgatatagatatagcaaaggcatcaattacacacacatccagagcattcttcgtgatctaccatctgagattcatcggatctcaatggtcttttactcccagctcatttggaacccaggggcatctgagttaacgggcttggcagtcttgaacatccaaaagacctgagcaccaagtaccaaagcagcgaagataccaagcgccacctccatggcgaatgtcttgccaataaccttggcgaagcggacacgggcagcccagtcaaaggtagtccatgcatccatgaggccaatcttgccgctgccaccggtgatggcagggctgactttacccccgaaagagcgatcaaatggcacaatagtctcatcctcttcaggaagcatagaggcagccacccggacaaagatgacacgagctggcatagagatcaggaatgccagaagagcaggaatcacaccggcacccataaaacggtagatggcaaccataggtgggacatcctggtcaccggcagcatcgagccagccagcaaacttggcaatggccatggggatgaagaaagcagcagcggtgagaatatcctggagagcagcagctggggcaatcttaatccaggtcttatagctggggatacgctggtaggcactctttggggagggctcagagatgacgatgtgcacccaggccatctgccaagtagccaggagaacgctcagaatagactgaacaataaactggcccaggtatgacgtggtaggaacagggattaaagatgacaggaatccacggaccacggtgtagcccacgaacatggtcattccacggaagcgagaccagtagccagcacgggagcgcaggtgcttcacagtggtgcgcagcttgctggtgataggcttggggggagtaggagcaaccagctcaggatcttcgtcgttggttggcttggtgggatcaggactgggagtaatgcgcacgtagatatcggggttggtatcttcaactacagccagagtcgcgaccaccattccgtaggtatactcgacctgtcgggtgttagttccatgagattacatctgggaaattgtatcacttacagcccagaaagcaaaacaaaacaagacaacagtgatagaaaacaaagcgaccacgcctccatttggctgttgctgctgaggcttatccgatgactgcatgtgagtagcaacaagctcggcgccccggcgcattagggcattagtgacggacataatgaagccgacaccgatggtgaatatatattcgatgaaaatgagatggaagctttccaaggttggaagagcaaagatgagaggggaagatgggggcttttatctgatacaaaggcaggcagcagaccgctagcgccggacccgtcggtactcttacagtacttaaactttgctggtgctccacctacaatcccaggtacctgtcgtgtaccctttaatcagcctcactccagttgtagttggaacttaaacattttccttgctctctagtaagatggccatattataactatttacttttcagaggtccacggaatcctactcggatggtataaatatagaacctcctgagatcatcggcgtccaattccctccgtgccgaccatgcatcgcccccaatcagccatggccccctatgttagcgctaaatccaggctgtagagcactctcataggcgaatctggctcggccaattcttcccctcgcccatttaaacctgtttggacattagcgcagatatggagtggggaagaaaaaaaaacttcttgttgagcctcaactgtctcaggcacagtgggtatgctgcctatatcccatcaatcaattcctacatatacgaatggtattggatgatgaaatttgcccaaagcttgtgcacattctagatctaatgtgacatggctaactcctggcacttatacaccaaaagagaccttctatagaatatcggaaatcaaccaaagatctaaaatgacacaagacgtgatcagaaagatgcacgccaatcaaagccaaatcatggtcgcaaacaaccatccgtggatgggacacaaaacgctgcaaaaagagatcaatcatggtatgtacacaaagcattcccgtcaactttagtcaaagagtttcttcatgcccttgtgtgccagctcaacgccaaggaaagtggcggcattagcagggaccgcacgagccagagctggtccgaatccagggaagaaggccttgaaaccgccgctagcgtaaactgagcggataacaccactcatagtaggcttgcccggcgcgctctgcaggcgggacttgacagtgtcaacggggaagacaggaatccacatggcgataccggcagcaccaccagcacacacaacggcagataaggagagctcgcccgtcacattgccttcggcatccttgggggtcaaggagcgcttgatgtactcgtaggccgcgaaataggcggcggagccggggccatcacgcgccaacgtcatggcgctaccacggaacacgctgcgaacaccaccttccttgtacagctgacgcacgacatccataccaccggagtacttgggcttctcacctggggccagagtcttctggccctggatctggaggagaaccttgacacgctcgaagggtgcggtgatcagagtcatagggatagcggaaaagaaacctgcagaagagatctgcgcaatagagtactgtggggtatcgttcttgatggggacggtggagaacttgttcacgagagtcttgccgacgtcgtaaccctaatgttttgttagcattgcttccgatcggctcgcggctgctctgggttccaatattaaattaaacagacgtacccaaaagctgacagcaactgtgaaacaggtctggttagcgcataactcggccaattgctatgtgagagccattatagctggtgctggagaacttacacatgggagtgactccaacaagcggtgcggagacaccggcatacaagccctacgacaccgttgtcagttcggtcgcgacatattcgacgtgctcgtgataatcatactcgggccaatccttcacgggcaactgtcttcctgaccacatccatggcacccgagtaaatgcccttctcggccgtctgcaggcgcaccttcaccagatcaaacgggtgtccgacaatcacagcgcagagaccaccagcggcaccagctgcgagagagcgcagctgtacaattgtctggttgacagccttggtctcgacgaccttgagctcgtctttcagctcttgcgtgggggtggtagaggtggacattgcgggcgggtcggagcggggaagaggtagggatggagatggaggaagagaaaaagaagaggaagaggaaggagaagacaggacaggagctaagcgtaagatgtagaggtaattaatagtgcaataagcgaagaaaaaaaaaaagaccggagatctaatgattgggacaccgacaaaccgaagccgactggtcttccccggacgaaggtgtgcctcggctcggcaacggaaaaatagacttcccgtagatagcacgtagaaagggagtctacagtactgtgacaccaaattttgtatgggactttggggatggtttgatctttttataggaattgactcacttaggtaggtatgctcttcttatataacgtcgggggcctccgagtgcgttggtccgggtgaacgggaaagctcaacttctccacgtttcccccgcgggataaaggatggccgcgttaggactaggttttattgctgcatctccctatattcctaaaactaaaatgtatggatgcagtgcagatatatattacctatattgcataactacaacatatgtgtaggtacttggaaatataggtgagatctacatgtgtaatatgtgcaccgaacaccggtcgcgatcacatggaaatccacatgccttcatcagtgcgacgctaacgatagtaattagtattatggataccttagctacgcccatgtcagctctcataactacatatgttagacatacgttagttatgggagtactaaaatccaggcaatttgggtttaaacaacagggtttggtttcctgtttgaatgtctgttcaacgcctcagtacggagtatagaaggataaatgccataagatagatttcattcattaagctcgacattaaattaacagctccgtagagtaaaaagaagacaaaacatgattgtacccatgaacgcgttccatattgtacctatacaagccagacggcgacacatgaatcgtagcccataaattgatagagggatacatgagagcggcctctaagccttcacatgtgagaaatttacagggcgaggatggcgagcatgccgaggacacccatagcaccaccgccaacagtggccatgggggcagcggcaccctcgctggcggagggagaagcagagccggaagcagagctatcagaaccggagccggagccagactcggtggctgagccgctgccagactcgctgccagactcggagtcagactcagagccactgccggagccagtggaggtggaagaggcgccggtgctagtgcgggtcaccatggaaccggaggcgtcagtgctctagagatatggtcagcgtgatcctgaaggagaagatgaagtgtgtcttacggtgacggtggaaacggagccagtggtggaagcagagccggtgacggagccagaggcgccagagccagaggcagtcttggagccagaagcgtcagagccggtagcgctggcgtcagagccggtggcagtcttggagccagaggcatcagtgccagtagcgctggcatcagagccagtggtggaggcaccagcaccggagccggaggcagagctggagctagagtcggagtcggcgtcagagccagcaacaccacctgcgatataatgttagtttaccgtatcaagtgttatggatatgatccatggtagtcacataccagggcacttggcgacggccatggcgagaaccttctcggcgtcgtcgttggggcaggcctccttggtgcagtcacggataccgaacttgtagttgtcgctcttgcagagacaggcgaggtcaccagccttgcaacccaagtcggcagcctggttgctcatgttggagagacacatggactggtaacacgggatgagattagcattgagcatgatccaacagggagtaactcgaactcacagcgcactcagaggcagaagggtcagcggccatggcgccagaggcggccatcaaggccagagcaacgggggtgaaggacttcatgattagagattagggggaaaggggattgaggatagtatgtgagtgttgcagaaagaagaattggcaaagtggaaactggaagaaatatatggggggggggggtctttttataaagagagcccttagaaaccaaaaagaaaaacaaactctgcatcacaacacaccagccacctgccccagactacaacatataaatttgagtctccatagtggacaaaagaggaagaaagtggacgatgcggacggtacagcccaatcatcatgaaggtgtggattgccctcgcagggccagttgggactgtcctgctacccaacgtggctataggagcgagagaaaatccattgcctgacccatatgaagtcatcacggtatccaaatcctggatctgctcactgaaatgggggaggatcgtcttggagatcgctcgcaccccttcttgatgccgatctcataggttcatccaatcgccaagggggtcttactccacttaatgaattggatttcagatttcagattttggctttttccacgatgttctccattattggagccctctcccatcttgccgatggagaactccgtgtggctgcaggggtaaccaaggattgataggtggttcatggtggctcatggtggctcatgggtggttcatgggggcagttcatggggttcccaaggttttccgttccttttcagccgatctgaacaatgttgagaggtcgaaacgggtggggatcgatccgaatcgggggaccgggagtacctcagtaaatctgaattgtcgaatcgccggacctcccgatcgcactattgaaatttgggaaactcagctctttgccactgtggctgaacagcgccacactcatcagttaggtattattactattactattactattacatacctacctacctaggtaggtactgtctattattcccaaggttattattatcaaaggactattccaaagctgtgtctctgtgtctatgtaccgagtagtgaagtactctgtcccgtctgctgatcaaggcttgtctaggagaacccctggaaagggattagagagatttgagatacataacatttactatgtacaacatatgtacggagtactccgtattaaaattggaatcattcggatttgcatcttctccttccttttttggcttttttccttatttttccttttcattagactattcaaatctttcgtagatcgaaatcaaatattcaccaattgaatgcgagacactacaatactctacaacatacggagtacacatacatacactaatcctcctaggaaacattttataggcttgacatcacgtgaaattgtggagcccctgatcagtacgtacggagtacagggtacagagtcagtcctatttcctggcacattttgttgacattttgacataatccaacattatgcgccaagcacgctgagcatatgtctagtaaatgcagctgtatgtatggagtactctgtactcaccggcatgttcccgctgttgtcaaagcctgcatcaattgaagctcctattcgtgcagatatcatacctgggaacctgcatagattcacccttcccttggcaaattcagacaccgctatccctaacttcctatgtcctcaaggctgaggttttgtcatacggagtaccgtgttgacaacggtctcttatctctacactataggctaagcccaaccggtactaatgtactaaatcactaatgcactaatgatattgacgttacatttgagtccagcactactgcctcgaccacgaggtgcttatctcgacttccccgctacaaaaacgctccttctatacaaacctccagggcaacctagaaagttccaattattactggtaacccagttttgcttaccaaaatggttctcagaagttcaaacttaccgttgaccttggaattcgatgccttggtacagcagcagatggataaatggaaagtccccggactatccatggcagtggttcatggctccagcacctggtcaaaggtatggagacatccatggatgattcactcgatgagtatagagtgcagatcactaaactacatttcaggcgtacggattcgctcagtttcctgatcgcaggatgaccaccgattcccttttctctacctgtagcaccaccaaagcattcaccgcagcggccatgtctctcgccatcgacgatagcaggaataccgaatccccccttcgctgggacacaccaatggcatccatactgagagatgatttcgtgctggggaaagactacaacacaatgcatactaccatagaagatgctctatcgcaccgttcagggctatcaactcacgacgcttgtttaagtttagcgcatccccagagatccctacgtgaagcagttcgaaatttgcgacatcttcctatagcctacgctccccgcactatcttctcttacaacaacaacatgtatattgctgtatctcatgcattggaacaaatcgaaggcagaactctcggcgagactctcaagaaacgcatttgggatccattagggatgaacgacacgtatttctccgtgacaggtgtcgcggaggacccatctcttcgtccccggctcgtgcagggctacacctgggacgcggacaccgaaacttacatcgcagaaccgtacatgaatgacgccgctatcactggagccggcgctatggtgagcagcgtactcgagtacaccaagtggctacgcgcgataatctatcaaaagggtcccatctctccacaaggccacatagaactgctgaagccacgcacggtcatcacagattgggaggagcttgtgggacctcctccggtcccatgtcatctctatgctctggggtggtttgtgagtagttaccgcggcaagccattgtactggcacagtgggagtttcgccggattcggcattatggtgggcttcgtaccgagcaacggctttggctttgctatgatgggtaacacggccaatgcccggaatgcgcaggtggaggtttacatgcaccttctggatcagtttaccggtggaccagggatcccacactcagtgggccaggcgaccgaaccagaaaacaggaggatgaaggccaggtcggagtgtatggaagaagccatcaaacggctttatccgtctctgcccgatcctgctattcctcatgctctacagttaagccaatatgcggggagatatgagcatcccgcgtacagttctatcactctatccctcagaaacggatgtttggttgcagacctactggaccgtgctgtaccttcccttatcactctcgcccatgcaagcggggagttctttgtggcgcatcactaccagcccaggaaaatcggatctctctctggttactacgcaactgaattcatagtgggttccaatggaattgccacggcaatgggcatggatgtggaacccgctttgaatggggagaagatgtggttcggtcgcaagtgctgatgcttatgattcaatattttatattcgtcgccgtgaaatgtcgaaagtggatcggcctgtatcaataaaattttgaatagagcaaaatctcaatatcaatccccctctacgaaattggaaggatatactccgcaaattgaagcctattaccaagtccatcagacttcccaagtggcaatgcgaaaaaaaataccgatgcctaacatccaaccatacaccctccaccctcggcgatgccggcgatgccgaatcggctcgggatgggtccggtggagtcgaacaaaaattttatctggaaaagcagacagaagcaaaaatttagtgaccgacgcagggatcgaacctgcaatctcttgattcgtagtcaagcgccttgccattgggccagccggccttgtatgttgtagactcgggcaaaatatggcactatcttgggccagtcgatattgggcatatttcatcccagaaaatgctcatttccaggcgtattgtgatagagtcatagatacagatcggtaagaagagatatatacaaggtaaaagaaaagaaaaacgtggtatgagggtatgttaatgcaagaaaacgccgtgacagaaaccgaaaatcagatgccgcccatatcgcccatacagtccagaccgagtcatacatttgactgggtagtgtctgtcacataaacatgcggcaccatgggggtcttttcagaaaccgtgccttcttccactgagataatccgtgacctatcgcctagtaccttttgccatccaagacgtactcccaaggacatcagcagctctccgatgaagaacccgaccaagcaggccaccagcccagcggcagtacccagcaaagcaggaagaatgatggggcggatgattcgcataaaggagttcttgtgatggctgttgtggtgaggacgacgatgttcagggtggtggtggaggtgagccggggtggcccagaaggaaaagaaacgagtctccgatccagagtcggttgtggctttactgctgatgaccctgatagcacggttttgagcagaagattccgtaagcggggctgaatcgcgggctggcgccgtggtcttggacttgatcttgggcttgtcgaaaatggaaccgaaccgtgtcctccagtaattcatcacccacgtctggctcttctgagatacatgatctccctgatcactgccatgagctggttcgacacggatgcgagtcatctcgtacttttcattttggaaggcgagaaggtcgacgactactgcgtccggtgacacgaggtttccctgcagatcgaaccactcgactcgcacgcggatcatatccgccgtggattccatttcgtctgtggggagtgtttgagtctcgagcgtgtaggataattccacagtcttgtcactggggttgaattcatagaggggcgcgtgcagctgcattatctctgatggaggatagacttggtgttcattggcgtacaggcttccattctggatggataaacttatagactgtactatgttagtgtggcgagtaactgataaaataggtatcacccacgattcttgatctaacgccatcttcgaggttgtgggaagaaggaacgaaagggagtcggagtctatgagggttggggatggaagaagcgacagcactgcctaggcagaggattgtccatagcaacataactacctaggtagtgggggtattgtgaagtaaaggatagaaatagaaagagggtgaactgtagaaagaacaaaggaaaaagagagagagagagagagaagatatttaacctttcagggttctggggtttttctacccttataatacatattctacccaggtatactaggtaatactaataagcactaatagtactaatagtagcagtaatagtacatagtataagacgggaaagcttagcgttggtttttatccaccgaacatgtttcactcgcttttagtggctcttcgggggctattcttagtatatttgactcgacttttcattattgagagcctcatctgaaattttcatgtctcaaacttcttttctctttctttttcttctttttcttcttcttttttgagacttgcagactcgtaacccttgagagcacgtatctattagtatttagtacggagtacatattagaacagtgccgatctgaacggatccggcattgttcagtttcctgctgcctaggtatatactccattcttacggagtaccagttccctacaattgtctaacggtcttcgctctagcgtaatccttcgaaactgacttccaaggttcccgtcaaaacgtgggatttcggggtgcgcggacgccgaaccgcctctggctattagatcgacatgattcgaggcaagagtgcgaacccccaatgtggtaagtgagaaaatgatcaaaaagtcgtagatgtgatcgtcccataaagattgaaagtcccttcctccgtatgtacctcgtactggaccctgaaaatccacgttggcccctaaccgctgccgacggggaattattagcgtggacatccgtggatgtgataggatagaaaacatcggggacttcgaaaatcttggcaaaacaagaaacccccaggctttagtcgaaataagcggttggaaatacgagtacaatgccaaattccctcaaactttaaggccctttgtctcggaatgaaacatctgactcatgctgaagagttatctacgtataactaccatttatttattcctagtccaatcggcctcgtctatgtaacacgtggatggcgtagcatgcgaaggatatctcgtcattctcatttaattgtctcggacactttaaaccctgcccatatatttactagacatcatatgtacaccgtacctataacataatataggctcaagtttccttataatagggcgcattttgccagaaccgacagcgtgggttattggtcaggtctcgcgtcggctggatagtgtgattgccaatgttcatgagccgtgcatgctgaccatgttctctgaaaaccggtgccagtggagatttcggcacaccatgctggacaaagctggtgaaatagtcctgcatggccagcgccacggtcacgttggcgacccccgagggcgaagagccactcccgttattgtaaaaagtgtacgagacatcctgtccatgtagcgcgggtggtatgctgaacttatacgcataggtctcgttgtagaaagcacgattgatataatcggtattgcactggaagatgagatcggagatgacgagcgccgtgcgcgcgaccgagtcggtgtatccataggagccgttgtagaccggtgggtagaggacatccaagacaaagtcagacacattggccggaatattcggtgacaaggtcttcatttgagtttccagaccggtgctgttaacgctgtcgggcgaagtaaagaccaacccttcgttcgcgttatggccaaccatgatgttcaagttgtggtcaaagtcgcctcgaagcagaagttggcccggtagagcgggcacgaagctgccgtccactacgggcccgtaggtgaattgtccccactgagatttggtcgcgacctggtatgcattggcggcgatcaatttgtccgatggcaatttccgggcttgttcaatcgtgctaacattgagaatccctaaaaactgctgcagggtgtcttcttgttgctcttcgccaatgacggggacccagcccgggctctgcaagatcgcttgcttgaagggtgcagcaccccgtgtgcctccataggcggtgatctgatgaaggatcgatcctgctccggcagactctcccataactgtgacccgggttgcatctccaccgaaaaggtgaatattcttatatacccagtcaagagcaaaccgttggtcgtggagtgctgcgttggcggtgccattggctgtgatactgtcaccaccaagccagccaaatgcgcccagcttgagaggaattagcattctcatggcaccatcctaaagatattctaacttactcgataatttaaggcgacgtagacaatcccatcattatttcccagcctgcttcgctgaatcaacccagttgggttcgagctacttttgtctcctcccacataccctccgccatagatccacaccagcaccggtgccaagttctttcgagatgtcgccgttttattctttgtacgctcgaagatgtctttggggacaacaacgtcaaggaatagacagtcctcagtggtgcgtgggtcttgctccgccgccttgtacccataagaagagatgttggtggattgagagaaggactggttatagaagtagctcaagaggaaggccggttgaacatttgtcgaccacaatggggctgcctgtgggcatatctttcccacggagccgttctggatgtgttctctgttttcttttgggagtataggggcctggaatctcaggtcaccaactggaggtgccgcatagcggatattgctgaaattatagaggccatgggagctctattccgagtgttagataataaattcagacaccgaatatgaaaagaacttagctgacattgaatgaaattgcttggtgtatctcatatcccagatcaaccacaggtaatttggaggccagacacgctgaagccagcgtcagcagtaacacggtgaccatcttgaccccagaacagcaaaataaaaacgtggggaggataggtcgtttcgatcttctgtgtttatattaatgccgggaacccggaggtctacggatacttaggtggagtatatgatccaccggacaaccagaggtgtatactagtaaactagtaaacttccctgccaatcagtgtaagccaagcttagccatgtgggaaatcaagtcagcgttccttttctgcgatatgcgtgatgatgtcaaagcgtgacatcgcttataacaaaccaataagagatgagattccccagaattcgtctttcaatccatcaacgctatactaaatctggggttgaactccgtatctacaaggcacagaagggaattgttgagcacagacttgcggggtactccgagaacaacattcagacggagattccgattatgcattgttgcctagaaccttctggtttgcttcgtttatttcgcagttggattaatccctcagccatcgacctcacggatcttatactcgaacatctggttagaaggcacttcatgctcattctggagtttcgcagcactctcggtgcccgctgctggcacacggtactcgaaccgttttccatgtgctggcacagatccgtcgggcagtgcatatgggaaaggcaggtactcgggtaatagacccagctgcaccagtactgttgcttggtcccatgcaatgtgttcatggaataagcgatctccgcggatgttgactacagatgtaaatggaacgcgaacgtgcttgcccgtaggaggaattccggggatcctaagagtgaagatgttagttgattgctcgatttaatcacagggaaacactcacatccagtctatctccttcacatgagtgaagacaaatatgaactcgtccacaatacggtcggtaccgactgtccgactaataagctccaaggctgtatcatcggggttgttgaagatgaagtgattgagataaaagtgacttaaacgagcccgtccaatgcctcctgttagagtcggcacatggttcacgtaaggctccgagaccatcgtcgccattgtcttttccaccgagcgtacttcaaattcataataggtgtgctcgtcccagatcttctcaaggtcaaaaaatgggccgcccacgtgctttttaacaaatccgacactccgcgtgtgagctactcctgcggtcgatatcttgaaatccggatggccggggatcatgaagctgggagcgggtacgtcggagtatatgtgtgtggttttcccttccccttccttcttctcaccttccattggactagacagctggaaaagggtggactggaagaatggaatgttccaagaatcgaaaaatactgcggcaatcagagctgtgccttgaactagtgcaccttgcagactgtcctcgaactggggagcataatctttctttgatccgtacactgagttaaggtcagtagagattaattgaataactgggtcgacacttcagtacctatcaatccaaccttctccgtgtcgcactctagcctctctgttaagccacgctcagcttcttgaagaagctctcgtagagatgatatatcaatggcagacttctcatccaaggtaatctgcgccacgataaagctttcctctgcccattttttgaggggttctggatcaagcgtcttgttttgctgctgacatgtcgcataacaaagaggtcgaatgagaatcagtcctggaccgtgtccacagcgagaaagagggggctgaatggtcacatttggactcaagtccacttgaatggaggacaaacttgactcggtcattttcagtcagacagattagaagttgagcaaaacccgggggtttcaaagtggccgggcgatcgttatatacccgggctctcccccactcggtccgccagtaaggacaaaggcgagacttagttaactgtgcaatacagggctccgtacatagacttcaaaacctagaaaatcagaaactcgggtaattattgcaattgtcgcacttattcatatatggtaccacacacgtgacctgtcgtcgaagctcggcccgtttccacgcgcgagctgtcgctctcccaagaacacaacccaacaatgaacgcacttgtccagtcggccctgactgatgtcgaatctaaactcaatgctcttctgactagcctcacaacctctcccactgctgcaggagcccccgcggcagctgtcgccctgctcgattcagacgatgcgctaacctccgccattgaaacccttcgacagcaccaagaaaaccatgcaaagatcctacggctgcgaaacgaggtgcagcaattggaggaccgagtcaagggcatcgtgggggacattgaaggcttcgagaaagaggtccgcacagcttgtggggacaacggcgacagcgacagcgatttcgattctgactccgatgacgatctcgggggaaagaactcattgctacggggaatcaaggagattgactacaagttactcttggatttcgcacgtcgcatcagcaaatacaaccacgaagcagcagccgacgccgcaacaggcgttgtgaaacggcaagaacaaggaaaacccctcgccgacaaagatgtgacgatgacgggaatgaacggagaacaaccaacagatgagggcgccgagccagtagcatctgtcaccaaaaacgcaacgcagtggttggacgattccgcgaacgttacgcgccaggtctacatgctgccctacccgatggaggaacggatacggatgggattgatgggtcaaatccagctttctgttggtgacgatcccgaaaaggaggttgagcggttattacgcgaatctgagggtcttggggccgcagaaccgccagcagcggtggaaccagcggaaagcacaaagcaggcagacgaggctgcaagggctgcggctcaggccgggtcatcagccgctggaatgccgcgggcgcatgccgtagcactagcaccaaaaccaaagcccaaggcgatgctggaccttgatctctatgaccccgaagaggatgaggattgattgtttttaacgcgggcgttgcattctatttccatgatgataccagctacaacagcacgaaatgccatttaagatattacttctctgaactgtgtctcattccacattgcatatcttggttcctttcgtccagctattgcatcttatggactgaagatttggccgcccatccccggaacctcttgccatacaagtagaatgggatggtgcagaacaccacactgctatcaacgacatgttcaagttggttggcatgacaaacttattctcttctaccgacgaggtgatgaacttagagaccctgcactcctttggtgcttacatctgtagtgtaggtaggattctatagcgacagtgcgagtgctaacacatatattttagtctgaatgtaaacacaaccatatacattcaggaatcagaaacgacgtgtctatggatatatatatagtttaacacactattttaactaacttgggttctcgcctctcggcaatcaaagcggtctcgtgccgtcggaagggaagctgatggctattaatacgttttatttgaggcgtttcaactgctctgcaatctgttgtagatgtaaataaggcccctggtttatatagtgagtttatgctccatttatggtgtcctccttagaaatccaagaaccgacaaactgtgcgatatatgctcgcatggctcagtggtaaagcgcatgactcgtaatcatgagatccccggttcaatcccgggtgtgagcaaatcatttttatttttgcattttgttttaagcatcctgctattccaaaaacaacgttcgcatggcttagtctggtgtccacggttctcggtgactgaggtttttgcccgtccacttaacgggacgcgacctttaattcctgtatataacattggagagccgagtggtgatataccgccctgtgcaccgcctgtctataacataccccaccagatcacgtgctatcaaattggctttaactggcagaaattggaagatatctggatacaaaggtttagcccaatatttcgggggtcccactgtggtttctgtgctaagaacagaattttcaataaatgtagctcgcgtggcaaaacttattacttgtaatcaagagatgctgggtctcttactgtgtttttccttatttttgaacccttttattctgtttagcctcatatagtcaaatatgtgccagcccttcatcaaaaagctcgcatggcttagtggtaaagcgcatgactagtaatcatgagatcctcggttcgactccgagtgtgagcaatttttttcgcctttatttcaaatatttttgacatgtaatcttgcgaagcccaccaacaccgggtaggtgttagtgaaggcggtgtcacgattactaggctcgagtatgagatcattcaaacctgagtggataaataaccatgccaaaaacatgagttcagcgaaatcaactcctgtctaccagatagaggagtagtttgcattctttttttgcatatgtcgttggtggtttatgttagttctctcagagccaatccagatcttgcctctcttgtctccccatctgtatttcaaattaagtactctttcattgcaagacccggctcgtaaaagcccctttaaggctgcgccgaactcctaagggagttgcccccagtcaaaatcatgcatgttgctattgtcttcctactctgtaataggtgtacaaatgttattacgatggtatataggtaagcgttttccacataaacgaaaactagggcccagggaatactgcctacaccattccatggagtcccattaagcactcaaatcggcgttcaaacatgtctagataattatttcgccaagtatttgtcgaccgcatatgcgacctctggcattgagtaaccaagcaaaaaataaatgaagcggtcgtcatcctagttgaccaagctcacatggggaagaacagtagagaaattgggcgcaaaggcgacatgaaaatgcggtcggaggctaattcgtgaaccggaaagtacctttgatagcgtgaaaccttagaatccgaccccaaaaaaagcttattcgggcgagagatctatgtatgtaaagatgggagtgcgaggcttccatcaacagctcgcatggcttagtggtaaagcgcatgactagtaatcatgagatcctcggttcgactccgagtgtgagcaatttttgctttagctatttcaaaatttttttgacataaattggcggtctttttctaattttcttgtttagtgctaccggtatatacatatgtagctgagtacttcgggtttcaacaagaaccagctcgcatggcttagtggtaaagcgcatgacttgtaatcatgagatccgtggttcgactccgcgtgtgagcttatctttttttttttttttttcattttccccattaacctcccctccaaagcttttggggagtaggtaggagcaggtcaaaaccatgcatgttactattattttcccactccgtaataggtcgatattattacggtagtacgtcggagtacggagtaggtgccttcactataggtaaaaaactagggccccggggatactgcctaggtagagcattccgaagttgaccgtgggtgtcctactaagcacaagtcggcgttcgacgtatttataattattctagatatctagacaattgtcgaccgcgtatgcggcctctgccattgatcaatcaggtagaggaaataaccgaagaggtcatcatcctacttggccgtgctcgcatagggtagagcagtaaaaatgggttcgaaggcgaaaaaggtggtcaggggcttaattgtgagaatccgacctcaaggctcgttcctgtctcgcgtatgtaggcgaagatgtggcaggcattcatcagcagctcgcatggcttagtggtaaagcgcatgactagtaatcatgagatcctcggttcgactccgagtgtgagcattttagtttttaatttttatactttactttaaaaaatatcttcaagatttgtgatcttgtcctgatgtcaagaaatgccgaggtgatgctattggagtacccgatcaaagaggaccatgcaatgattatacgggactaaatctggggttgggttgtgacagagtattttgatggacatggcctttgaaacagttaagacatgacatgttgcaaatagagtcgacagtgaaacagtgaggctattaaccaatctaagaaggctggagcgcgtaaatcatggatcacatgcggtgactcggaatgacatgaaacttgcttttcgggctagttcttgagattgttagctcttgagattgtgttgatagtaccgtaagcaggaggttgtgctgcgagaataatcataatcattgattcattctgttagaagaggtctaagttgacgtcaagatgcactgtggagtgtgagattgatcggagagttgtagaagctaagaataaactaggaatccgacacattcattaccaacatagttctcggtgtttgtggatagatgccttggaggatcgcccagcagcaaggattggacgctttgtttgtggcttgggacctcatctccagatagatagcttgttcctttctccttctaccttcatccttcttccctacagacagtcatcagtatctaatcgaccccgggatgacccacgcttagccataaaggcgagcgtatacggtattcgctcttccgacaccacacaggaagctcaaaattttacaatgagcccaggctttagggtccctcaggatccgtgttgtttgtacctcccaatactggtttgaagatatgtactgattttctcagtctgcccaaactgcggtaatctcctagctattgctaaagccgacatggaccgaaacaacccaactgaggtgagcctgtttccggagggcttgaaggtcatatgccgcacatgtccctacacatgcagcattcgagagattgtgttggaagaggtcgactcagatagcacggaggaaaacaacgatcacaacgacatcgcctctagccaagctgatccacacaatgagcttagcagatacacccagaccgtcatggaagaaatccgccagcttcaaggtggccaaattccctgtttccttgccgataagctctacccggaccaggccttccagtttccttcccgagccacaaaccctcgcctgaataacccgcccctacagcttattgccaaagaccttctcagaaaagtaaggcttcacgagactcaatgccaacgttatggggagtttccagagtccaatcaggggattgaggatgccctctataatgctttgacaccgacagcaaaggaagctctcgaaaaaccctcaatcggactagctgagtatgctcatcaactctagcaatattaagtctagtagagactgacttggtctagattgatcgacatcggaggtagtcctgagagagacgaaggtactgggatctatcttcacatccttaaggcacataccctgttctatctttacgtcggccagggtattgtattctccgaacggatcagctttcacaacgatcccgcgaaaagagctagacatccctcgctacattacaaaatatgggaattgcttgaaaaaatggatgggtttgaatctatttttgtcaagcttgctacattcgatgaccgtccgcgaggccccgcagaacagctacccttgaatctccaggaaatgtttttagcttgcgttctacagaccttaaagccctctgatcttgaaatatggttacccgaggacgaaggtgcccagagaccttgggcagggctaggtctcaacatagctcttcccttgtggcaaggatactcctcggaggataatgtaccctacgatcaagtgaagatgacaggcacagagttctcagcaatgcttcgcgacagcgatggacttcgtcgacaatgggcaatcgctgtacgcgatgcttatcaaagtcttcgcacacaccccgactcccgaatccagggactatggttctcggattttcgaaaatttttagaagctagaattacagactcgcttcccgctggatatcacacacatcagatccgtgctagggagggcgtgaaggctttatttgctgggaagtcattacaaatgtggcagacacagtggggatattatcatgcccagtattgcgattatgctttcacgcttaggcacattaagcgtttttctttggaccaatatgttgccgaaaaatccggaaagaaaaatgatcattatggtaaagtatgtgggaagaccgtcttcattcgacctgtgttatctgaaagaccaactagtctgcgatacgcccgcaaggctgtctcaactgatccttgtgtccgacttatggttctcgcagatatggacaatggggacggaacgggtccactacatattttgtcaagctcaggggacgcagcggtgacaaagcttaaccgaatggtggatatttttgagggaatagggtattatcaatctctggctctgggtcatgtacatgtaccgaagagaccatcgagacagaattgttccgaggtagatgtagaagagcactagttgcccgtggtttcccctcgttataggcaaatgcattgtctttcttccctcatgttatattgatctctaattggtctatgcctcagtaaaaaggtaaatagtggacctacatatatatgtacctagactaagctcggccagcgtacgattcgggtaacgacggttagagggtaagactataggggtgcataggtataatagtgccctgtttttggcaagcaacccgtttggcgcagaggtgactccacagtatttcgtagggatatctccatgatatatgtaccgagatagttggtcgtctcgtattaaggaataaagtgacttcagatttgctacttccaattcgacctcgagtcgattgactaaacaggagacttacacgaattcattgttgcggtagcactataaacacgataaaatcggactcgaaggtagaactgatatccctttcgcgccttagcggagcctggaggatctaaggctacattccggagggtcacgcagcttagtcttttcgatattctcttttcaatgcccaggtgcccagatagactggttagcttactaaagtagctggtaggtctaggtaaggtttattctaaggtccctttcttccatagtcattcatggcctttatcccggcttcgccatcaaacttgccctcttgttagccttattaggaatatgtagtaccacgctggaggacgttccggaccatttttccgatcatctccttatccttaaaaggttcaagaatttggacccaaacatctccgcgtcggattataattgcggcctgtcagccggggccttatcaatgccccagagtgtggagggaagaagatcgatgagcccaatgatgatcgatcgagtcatgatccccggatgtcacctccacaccacgaaacacgcgaagaagcttggtaaatcttggtcgagccagactgtgttgatcacccggaccaatcggaaacaccgacgttatatctatagggtcgatgtaatggcctcttggcattgctctgggaaacccccaaaaagcatttaattaggctccggggccccggtttatgtctgtccagaatggcggttcttgtccttttgggtgctgttttgccgagagcccttgaattgcttttgtcagatacctcactacaatgagtcaccacgaagatcctttctccaatcatgatcaggcagatggtgatgtggagaagcaagatgatggcgacggtgatatccattctcatgggggcgcctctaggcccagccgccgaaagaaagagggtgcagatggagttgtcgatggacaagacagagaagaattgaaagaatgggagtgctatgacaagctaggatattccttttcctggtggaagaaatggggtatcctctctgtcatctttgctgtccaaacgtctatgaacttcaatgccagtttctatgccagcagcatcaccctgtacgcggcgcacttcagcatctcagaacaggccgcacgtgttggtcagatggcgttcctggtgtcttacgcatttggctgcgagttttgggcgcccttcagcgaagagttcggtcgatggccaataatgcagctcagtttgctcttcgtcaatatctggcaacttccctgtgctctggctcccaacttcggcaccattattatcggccgcattctcggcggcgtgtcctccgccggtggttccgtaacgctcggcatggtagcagacatgtgggagccagagggccaacaatatgccgtggccttcattgttctatcctccgtggcaggatccgtcattgccccagttgttggaggcttcgttgcaaccttccttgactggcattggaatttctggattcagcttatcctcggaggctttgtgcaaatattgcacttctttattccagagaccaggtgcggcatcctcgtcactagagaagctaggcgaagacggaaaaacgggagtatggtatggagtggtgacgagctgaagaagactcgcatgtccttccgttgggttttcatggtctggatacgcccatttgttatgttcgtgcgcgagcctatcgtcttgtgcctctctctgctcagtggcttcagcgattcactcatcttcactttccttcaatcgtatacgccggtatacaagcaatggaactttactacgattacaactggacttgcattccttccgtgagtgcgcacgatcttgaacttgagttaattctaatgattatacagacttatggtgggctatttccttgcctatttttcgttcattccatggatctatcggcattgcaagattagagagaaagatcccgatgctcttcagccggaagctcgtctttattggttactttggagtaagtattctcatgtttgatcggttggtctcattactcactagtaacagcggcccctctgttgacgattggcctgtttggattcgcatggactagtctcggtccaccccatgtccattggattgcgcccatgatcttctcgactttgatagctattgctaacgtaagtcaagaatggacctctcccttgatacgacactgatggcttattccatgattaagtatgccatttacatggccacaattgactacatgattgcctcgtatggtccatatgccgcctctgccacaggaggaaatggattcgcgcgtgatttcttggccggtattgcagcgatgtactcaatgcccagtaagtgatcacaatcctgcaacagaatatcccctgaccgcgaaatacagtgtatatgaacatgggtaaaacacacaacctggaatgggcttccaccttcttgggcttcatggcgatcatattcactattccaatatacatattctattggaaaggtcctaggattcgagaactgtcgccattcgcgcagaccttggcttccgacagaaagaaggctggccgcagggtttcttcctgtggttccggtgatccagatcctgttgaaaggtatctgtctgaacgttcctcgtcggagaccagaaccagatccggctgaaaggtgcccgacacgtttttcggaaccaagtctattgagacatgaagatggtatacgtgtctagtttcaccgtggcttgggttgagtctcacatcagaacggtgggaagaaaagtatgcatttattgatacaggatttaagaaccggttgcatcaaaaagcttctctgtggttttatggaggcattattcgtgcttctcagtttctgttaagccttcatcacgactagattagggaactgtttttgttttcatttttattgttttgatatatgttataatggacctgctttcacacgttgtggtatctgctacatacacttatgcgtgatacaagaatggcatcatctcttcaagccctagtcatagccaacacagcggaaataatttccgataaagcacgagcggcgatattctttagtatataacaagtgtattttgcccgcaaaaatgtttgaaattaagtagaaggtatatggttaaatacagtatagttcgtggccctcaatggtatagacataaatcaactaacatcattgattccaagaatcctggagtttccgaatggcatattcagtagtccaacccaaatcagcttcgacgccccgtagcagatcaacaataatctgatgttcctctggattttcaagacactgtccgacagcgacaagaagcgggaccatatatatgcgaactgcaccctgggggcgacccaatgcaatgccgctgagttcacgggaacggaactcgacctctttcgtgacctcccggtacccttgtaagcggtcaaaggccgtagacggtgcactgatcacatctgccggacgattcagcaataatgcgatgcgcccgaaatggtaatgttgcatggcagcagcacaggttgtcaagctatgaaatatttcggggaatggcaagtaactcccttcggcagcctgtgatagatccttggggcgctcgatccgcactgaagagcggaacgtttcgggcagattttcaaaccacgtttggaattcgaagcatagtttgagccaggtatctgtgtccggataaggcagttgagcggcatttgttgtgccctggatttcaggtgaagctgccggtgatccggtccactgcgcgagctgtaactgtttggacctgctgaggaagttgatgactttggcaacaagccagatcaagccattagcagcctggtcatcctgcgatagagttgacccgttccggataagatgaaagtctttctgaccattgattgaaattcctgctgcccgccagaggggcaggttctctggatcgaagtgtgtaggtgagcgggtgaagtaagaaccgagatagtcttggcgagcgaaattccaaaaggcagcccgaatgccatgggagaacagggctgattctgccacgtgtaaactgagaagagaatcaaacaaagggcggatgcgagaaagttgcctggggtctaagtgttagtaataaaacagcaaccaccaacgagtctgtcttacatgtgccactcatctccaggcatgtctaaaagcctgtacatggtaagaagcgtagcagtcgccaacagatcctctgtctttcgaatgactgttacgtcgttcggatcttcactcgcaggtttcatgttcgcttgagtctgaccagagttgacccatcgacaaagtatctcaaacggggattccaaaatagccgagctcgacacagtggtatagccatcggacgttatgttatttaaatccgaagctgccaggtaatagtaattggcagccttgaggaaccagtcaacttgagtcgcatttgggtaggtttcggtagtcgcagggctcgtgaacattccgccaatggaagccttgacccctttcaaacgagctaggtgttttgctgctagcgctgcaatggcgtacttcacggaaagattgttgatggctcgaataggagcatggacggtgaagaatttctgagtatccgacaaatccaacctagttatattatcaatacactgtacgtgcaaaaagaagtgacagttgtacgcaccatggacctatgacctccgagtaatgtcgagtgaggaacgcgatctcgtgttcagttccagtcatgagttccgagaagatatcttggaattcatctctttcacttcgatgcgatgagctttcggagatgactctttggtaatcggggcgcttatgtggaattgtgtcgtatgtgttatcaaatgctgggaaaccgccggtggctggtgaaattgacttatacatcgcgtttcttgtagatacgctgccttcctcgaagccagagagggaattgtgaatagagatagctgggctttctgaggcatgcgcgtttgtttgctggttactccccatagcaacctctgaccgactagaggggccagacatctctactatcatcgggtcatctcttgagcctaacctcgtctcccccatctggaagggaatagcaggattaacttgctcttgaccttggttccattgcaacacctgctcgttaggtcctacttgcgagccttttggctgcgttgcgtctgaaaccagctctgtggggacctatcacaaagcataagttgtctgggcagaagggtagctggcggtttgacctactttacttgagctgaatgcagagcctggctttggatgaggctccccatatggagcataacggcgccttactgtggctccttgatcgatgaatttgcgggtctgaacatatcccgggcattctaccccggcggtggtgcaccgctgacaatgagggcgagtctcatcacactgccacagattagcatcaatcatcaaagccatgttcagatttagtgaaactaactttgagatgcctctttttgcaacgttcgcaagccttgttagatggcaccccaggcattgtgggttccgtgccaggatagcgatctctagggcttcgtgctcaattattgtgagggcattggggaatctccactttgcgtttttataccacacggagttacttcacatttcgaaaatacatcaggtgaagatgctattcgagggcaagaagtctagaatgaatgatgcaagatgcgtccttggcccgcttgaagggtgattacataatctcacgggaatttctcgcctggaactcggaaatcaggtcacgttttccctgtacatcctgtcgtcatatctacttttcttcaacaaagaccatacatcatgctgcggacaccgtcaattctcgttgatagccaacatggtacatctactccattggtccggtctattgaagattatgatcagatacgatggggctcaatatcttcaacacagcctgttcttacaggcccagaacaaattggcgtatatcacgaatggattggtgtgccacgatatcagattgacaatgatatctgctaattactcatcgcagatgctgggaagcctcataatatagtttgctgggagtgccgtctacctgatagtctgattggttgccagacgtgctgtagatcctaccatacagcatgtctattggatgtggtccgctctgcaaataacttccattgcccgtcttgtcgagcaaggggctgggatcatgcaccgccccagttccccgtgccatccccagctccaagtactggtgggacaactccacacagccattcagagccatcatccggaaatattccaattcttggtgatagatcaccaacggcatcaggtcgtaaatcttcagtagccccgcggatgatgaacgcccctacaatgaactgtattggtgaagccaattctcgcggtacgccagctgaggtatttcctgttgcagagacgtaccctcgacttctggaatatctagcgctgccagatgctgagataggccgccatgcccaatcatcacagttcaagcaccaactgggaatggcgatgaaagaaattgaatcaaatcgggcatcaatgcgagacaagtcgaacatccgagaggactattcacgattacagcgcgagaatgcacagatcaaagagtaccttgattctacgcactcaccccgaaattctgccattcccagcccttcgacggtttcacacaacatcatctcaagaccggcgtctgagcaaagggggaaggcttgggacagccttgctcttgacatgttttgactgttcgtgtctgactgcacgaatcatttttgactcatagtcaacgatgaagttgaagagttgcagcaaaagaacgaacattgcatgtcttgagctttcgattatccgacacgatcacttccaatggcctcgatatttatttgcccaacatcatttctcgacgttccagatgcatgttggaaaccctgcatttcgccgaagaggtcccgaccggtcgatcgtaatgttgatcatgtcaccgtcaccgtctccctatttttgacataaaatggcgcggagaaggttgcatgaaatgaggactttggctcagacttggcttgtcgctctcggaactgacggatcaacccctggagggacaattgttggaataaaatacggcattattccactcgaccaacacaaaaaccacggttaatgtgtatagcctaatggaggccataccccagtttgacaacaatgttccccgcagctcggagtaattggcttccctcaatctcaacgatcgacaagtcagggatgcgatcattgaaatttccctttgactttgttcaaagcgtcttccttgcgcatattcacgctcttgactccttgatcttttcctatgtgaggagcaaatgaacgtggcaggggtgtattccgggcccagatgtggtagatgtgacaccattttgggcgagcattgaggttacgtccactggtgaattgctcctgcatattgtcatttggccgaaagtccgaggataccagggatgcgactggcggtttccccattttccctcttttccctcgaaaggcagttcgcatgccgatctgatccggaatgctttcccccgcgacttgttgccaatccctaaataaggagcttaacttccgaagtggaacgcgtcttttctacgtctcaattgcaaggctgctgggtagctattaaattatcttcgtggatggttgtggatagtcccctgttatgccaccacaacatccctccctccgcatgggactcctgtgtagcatcctaacggccctctatgcttcgaacgcgatagccacaaaggattattcggacgatttcgacgttctgaaatatgttgatcctttgattggcaccgcgaatggaggtttgtcttgaatatgacgagcatttccgtcagcgaaggctcacaactcttacaggccatgtgtttgcgggtgcgactttgccatttggtaatacgaaccctactcaagggctccatgtttgtatctagaaaggttaacaagtacaggcatggccaaagccgtggcggacacaactggcgagaatcaggctggcttcgcttatgatacggaggtcgtgaccggtttctcacacatgcatgattctgggactggcggcgtaagttttcgcagattgttggagaccatgccctctatctgactcgcttctagtccccgtcaatgggaaattttccaatcttcgcgcaaggaaattgcccgcatgacgatattaaccagtgcaaatggcaacaatcggacagggcagctgtgtgggacagagagtcccccgaagctcgcccaggatatttcagcatttcattggcgaatggcgtccacgcgaaaatgacaaccacaaatcgatctgctttatatcggttcaccttcaatgaaccttccagtcagccactcagtccagtggtcctgctagatttgatggatttacctcggtctcgaagaagtggaagtgccgacgtggaccgatcgactggccgtctcacgggaagtggcactttcagcccaagctttggtattggcagttataagtcatatgtctgcgttgatttcaaaggagcagagcttcgtgacaccggcatctgggagagaaaccagccagacatcagcaggcggacgctgaacctcgggtctgacgcatcatcatttctctcggccggtgcatttgccagattccacgcccctaaggacaacaatattcttgttcgagttggcgttagcttcataagtgttcatcaagcttgctcgaacgcggagcgagaacaacccgactttgatttcgagggcaccgtttccgctgccgaatcagcttggcgaaagaagctggatgttatctctgtggatgcggacggagtttcgtcggatctgcaaacggtcttctggagcggagcataccgaacattcatcagcccccaagactataccggtgaaaaccctctctggaaaagtgacgagccttactatgacagctactattggtgaggcagcttggcttcgaaacaatgactagcatgctaataataccactcagtatatgggactctttccgcagcattcacccactgctgaccctggttgaccctttctcacaatccctcatgatgcgcagcttggtcgacacctataggcacgaaggatacttgcctgactgtcgcatgtcactctgcaagggattcacacaaggcggttccaacgcagatgtggttatggcagatgcgtatctgaaaaaggttccaggtatcgactgggacactgcatatgaagctgttgtcaaggatgcagaggtagagccaaaaaactgggatgtggaaggtcgcggtggcttgcggagttggaaaaacctcggctatattcctcttgatgactatgatcccgatggccaaggtacacacactcggagtatatcgcggacggtggaatatgcctacaatgacttttgcattgccgagatggcacaggacatgggccaccaggccgactatgagaaatacacgaaacggtctggaaactgggtccacatgttcaatcctgaccagaggtcaagcatcaagggggtcgacaccaacttcaccggattcctacaacctcgatacacgaacggcacatggggctaccaggacccggtcttatgtagtcctctcttggacttcaccggttgttatctcaatcctgatggccacgagacgtatgaaggtagtgcgtggatgtataccttgtgggtgctcacttatgctttatgcctgtactcgttactaacgatttgcttacagctatgcaccccatgacatgggcgctcttatcaagacgcttggcggtgccgaatccttcacctctcggctgagctatctacatgactctggtttgctctatatgggagatgaacaggccttcttgcccgtctatcaattccactactcgggacgaccaggtctctcggcaaagcagagccacttctacattccatcccagttcaacacgacagtgaatggtatcgctggtaatgacgatagtggggccatgggctcatttgttgttctgaacatgatgggtctgtggccagtgcccggtcaagatgtttatctgatcactccaccgtacttcaaagaagttagcattcgaaacgccctcactggaaaggtcgccactatccgcaacgtcaatttcgatcctagttacgagtccatctatatccagagcgccaagtggaacgacaaaccttggacaaagaactggatcacccatgaatttttcgctgacggcggtgttcttgagcttgtgctgggacctaaggagagtgaatggggaactcatattcaggatctcccgccgagtttgagtgattatcactgaattgttgattgggaattgaggagcaactgctgagagagtggcagctttatactacatgagtatttcactaaaccttttgcatgaatagtgccgaatatggctattttgcattattctcattcgcgtacttgacttggattcacaacgcaggcccttggtttaccaaaccacgagacagcatggttatcccttggacttaaggcaaagtgtatcctccatcaattacgaggtttgcaccagtcatatagctagacgcatccgaggcgcagaacacgtaggcctagatggggttgtcagtcaatttctagaggaactggatctgtggaatctcacccccttcagctcataagattcagccattctcttagcaggaatcaagtcgagccatttgtcgcgccagtcctgggggaagctatccaggatttccgtagcgatgtaaccaggcgagatgcagttgactcggcagtagtcaacccactcgacggacaagcacttggctagctgaacaacccccgccttggacgcattgtactatgcaagaataagcgacatgaaaggtaccatttccaatagggaacataccgccgcttgcttttgtggttgattgaccagagtcgcactgacagaggccgtgaagataacatttcctcggccttgtgctttgaatatccgaccagcagcttgggccgaatagaaagcaccatctagattgaccttcatgatgctgctccattgatcggaggtgtagtcttcagcggcgatgttcgaggcaatgccggagttaacgaccatgacatcgagtttcccgaaatccttcgcgatctgctgcacaaccgcctcgatctcagactggatagccacattggctttgtacgctgctacgcgtacgttgttagtcgatgcgatgtcagctgcgattgtatcggcggtattggatgtgtgatagaccatggcgacctttgcagattgttagtttgattgtgatggagcatcgggtggtgtggcttacatttgcaccggcttcagccaatgccctcgagatttcaagaccgattccacgagcgcctcctgtggcagagtgttagtgagacgcttttggtgatcgggagaaaccgtaccagtcacaactgcgaccttgcctgtcaggtcgaaggccttcatgacatgctggtttgggggttgtgcgaggaccattttcgtatttgctgttggactcgaggtattggtacgaattcaatcaaaacttcaacggagaagggcgaagttggatctgagccatttccccctcaatccccgcatcgggtcatctccgacgtgatctccaatcgttgtgacttcctcctgcagctgaaggtcataaggcaactcctgtgatgatccgggatcactctgttcctttctgggtgcttggctgttgattcactttcccgttgttctggcgtgaattgttgacacagctgggtgaggtggttggccgagaggcatcgagacatcgattcaatttcttgagtcccttgaacaattgcttgttctctcggttgagctcataagcccagaggagggcgagggcttcattctttgtgttttccattgaagacggggggttcagaggagtagagaaggggaggaatgaaggaaagaggactttacgcagttttacagggaacttacagtccaaatactcccatctatatatgtacatatgtatctactctacttctgatctctacgtggctcataaaaaccaaaaataatcgcagaaagggctaaacttcatttcgttttgatcaaataccgagacaccatatcttcaaagatgtcgtcaatgtttcctccgggcttcccttaatcactcatggtatcgccctcatcctcggtatccttgtccttgccatgagcttcttcattggaagcttccatttcatcaagcttcttcttcagacgcgagtacctcatctgagcggctttgttcttggtgccaaagtgcttggcgacggctgggatgtcaatctgtgcgatgatgttagcatatacatatgtatctaggtaattgagattcatgagaaaccaacgttaacatcggagaccttgtggcagacccataggaataggagttgctttttcagatcggagtctttgggttcttttggcttggatgggcttttgccggccttgggttgggtgggagccattttgggagatggtagatggtggatggtgtaatgatgagttctttgaatgtggtgatgttggagagaggaggaggaaataaggagagagagagagagagagagagagatcgaggacgaggacgagtttttatcataaagagactcgtggacttagcaaacaattctgtctctctcaatttacttgaacataagttccatagtatttgactctcttctctattaatctatcaaaatcggggtatatgaccataatcaaatcaaataaaagccatctagaaatgttcagaggaatccaccctttgtcttcactcgagattcttaactggatgtaaaaagataggaggcagacagagtcgagggttttccttctcccactgcacacaattagcactagaatatgtcaaccggagcatgaactcacctctttggcgccatcatagcctaaccaggctctgtacagtttctccgcgaattcggagttgaacataaacgttgtgttgtacataatatcatcatgttgaccccagctccagatactgttaaaaccagcattgacctggccaggctcacccgggttggcgcggcggttcaattcctcggggtcccatttggcgtcatggtacaccggctgagggatctggacagccttcaaaccatagtacaaagcccaggatataggggacatttcggacgcgagcccaacccccgatttgaccttatccttatgcaacaggccgagtagtcgcgccgagatgcgagacattgccacaacagctgcccagcgcggagtctcttgatcctgagggaaattgaagacacggtcacggaaaggccagtctgtaccaactgggttgaaatggggcagccaggtaatcagatcggcttcttcacccacaccccagctgcctggttcatccgctaggcgtggcacaggggggattatggcttgtccttcgatgtcgatcccttctgcgggacgaggaccccaaacactactgttgtcatggccaggcatttcctggtccaccttctccatgaactcttcccaggtgccgtggacagcagggatatagaagtgagagttacgctcccacagatatttccgtggctgctgtttcgcaaactcggctgccttgtgcagaaggtcgtacatatggccggtgtatcgcgagtccatctcgaattgccagacatagtcgtactgggggtgtagtcgtgaaaagatctgcgtgggctgaaaatactgtaaaatcgctctgatagaatatcagtagggcgggtctagctctgggggcgaacacatacacatgaacctcaatcccaggataccaatccttcaatatctccgcgttaaaccataccgccaggctacgcagctcctgtggcaagtgcttcgcattgaatgccttccaggcggcgtgatcatcctttttgggtaattttttgccttgggagtcaatcagaagaataagctcatattctgcacccgaatagagtgacaactccatcagcatagatcgaatgtgatacaagtcgttctcggtgtatttcattccgatccaagatcgtagtataacggctgtccggggctgcatcttgtcagttccgttcaagggttcgcgaggctgcacatccgaatccagtgacttgtacagagcgaatatcttcccttcggatggctgagtacgatatcgaacactattgcgctgcaggcactcatattgcaaatgggcccagtccacctgttcccagtcgatttcggaagcctcgttggaaccgaatgtaccatcccaattatggagagtggtctcattgcccccaaggtaaccgtatgcaccatatcgggagtagcgatcagcacagagactcttgttcagattccacgactcatacgatccgaaaatgggagttggaaaaactagcctctaacaattagtttcccgtcgactcctgaaatatccctctgcgcacctgaagcattccagcgaaacccgctcatcatcatatcttcatcttcgcggctcaggagtcgtccttggggcccaatgcatgggtgataagacccctttgacttcgacttccattctacactatcatagtgtggataggggtcattgatcacttgagctgaaattcgagattgaccggcgtaatcgctcgggaattggtcaacggattgttctgcagggctgatacagatcaggatggaccagtaaaggggaataagagggatctgcaattactttgacagcttcactcgcaatgggactactacagcttctctggaataaggaatggtgaacgacaccaccaggaacaaggcgatagcgaggcgccttggagaactgaaaaacctccggaagaaatccattagaacctgcgaaatccaaaacattaatttgggagccttgcaagttttataactctcaagaactgccccagtgctagtggcttggctggggttcctcttgtgtgtttggccaatcgtagagaacagtgagtgcatggagactgcccaggtgccgagaggtccgaatagtaaagaatatttattcagttagttacttactaaataactaaatacctggtcttcttttagggttggcttaattaattctcttatagtcggatcggatcctccccggatctgctatctttcatgttgatctttttagccctacttttatatctacggagtacagtgtagaaggaaagccaaaacaaaatatgtactcgcctgaatagggatatcactatgtactcaaatactaaaacaagtccgaatacaaacatccgtgtgtaacgccaatcgcccaatccgatacgaaaatgcataccaaacaggcattccaatatgattacacgtatctcttccagaatcctcatgggatttcactagtcagtcgcggttcgtcgaccccagccactgaagaatcccccaccgccgttgctgggcggtgtcccacctgtctttggggcttcgatgggagatttattggccaggctgatccgcgactgcgagagtccaacaaaagaatggcggttctcaggattggcctgggaggacttgatcattttccggaatgaatccaacttgcccttgacttcctcaagctcttgcctagcaaccgcctctgccgtcttagcagtaaccaactccatgagcaacgcctcttcggcgggtttgttgccctccgttgacaaaacgctctgcagacccaggctgctcgtccgtctgttatatgtggggctttttgtggagttggtgcgggctagcttgaactcgcgtagcccactagtgggagattgagactcactagagtctgctgtagaggatgtgtctagcggtgtttcggatataggcgttttgagggtacgcagctcccggttcatgcgctcgagtcgctgtcgttcccgataaccgtcttgaattcgaccccgagcttcccgtaattgctccttgagggacgagttctcctgttcaaaatcgtcgatgcgccgggtgaggttcaagcatcgaccgacttccacctcgtgcatttccttccatcgagtaacatcgtcattgagctgaagcttggtctgagtgattgaaatacgcttcgggttgaccgattcaaaacgtgtttgagccttcgctattaattcgaccggttgtgtctcagttggctgttccctgatttggttcaacagctccttggctaggacatggtcttcctcccgctcttctctctcctgctgcagttcacgggtgaggttagcctgttggcgctgaagatcgctgagcgccatcaagagttcttcaatctgggtatgtaggtcgcggtctttgtgatgtgaagacatgttggatttcacgcgcgacctttgactatcgacgctagctgccgccgttgataattcagtagcagcagtacttgcgtcggacgtagtctcgacggaattgagagtggaagtcaggctctgcttggaggtagagcgacgaatggtactgttctgacgtgacgggctagtattcgggttgagtgacttgaccgaattgtgggagttcgaggagcccgcccatagtcgtccaaggaagccagaggccgttgcctgcatctgcggaaaggagggtccggatggtgagcctttagactggttgtagctggcttcaagggtttgaagactctcattcgtcacgagagacgtgagagacacgaaatcattaacgagatcgtcggcattgaaggcgtatctgaatatcacgggttagcgggggttctttgtttccggcctttgttttgtgcgatgcccgaaacttacgtgtcccacaagcttcgagatagtaacagttgcatcacgtcctcaaattcggtgcaagccagaattctcttctcgttgcgctgcatcagggaaagtgcaactcgcatcagagtctcgcatgcgccttccaaaaaaataacatcataaattcggagaagcatcggtaacggacaggccaccgcaaagaatgataggaaccactgcgatacgtagaccggctcaacgtgcaatgcttctaaatgttggaacaggaccggcctgtgtcgtgctagaagattttggaactgataaacgtgaaggtgtagacccgagagatctggaagatagcaagttcggaggttgtagtgatccatgaggctacaatacgtgatgcatcagtacgacttatccaagttaggtcatcgtccaaaggagacttaccggacaagaacacaaaaggcctcagcatccgtcatgtgcatgagcagaggacctaccacaaacccgagaccttggcagtagccaatcttggtatcataaagactgaagcatcgcaacacccggccgagcatttgttgaccctcgccgttcgggtcgcggaacatttcaacattgggaaagctgcgaccaatatctttcccaattagcccatcgtacggactagtttcacccgaaagtctctggaattcattcaacagagtaggatcgcgggctcccgctaggctgggccacaccacccctcgcaatgggggaggcacacccccttgaatcttattcgaggtcaacgtcggcaaacgctgagcagtctgatggtaatcgtcaacaagtgcagcccaaaactccaactcggtcattgggggagggggtaattgcgagtatcgcagctctgcccgagcgggatccctaatgagtcgcttgatgtggtgtagtgactcagagcgcgactgccgctggtgtattttaccattaggagcctcgggtatccgagatttggggttggtcgccaaagcattattttcttgttcaagtcgagcgagaagcagggccgtggactaaaattaggtcaagaatgttagcacccgttctagaattctgcagcttgtcacacttacttcatcggacccctccccacgcggttcttgttcttctgtcttatcaaggttctcccaatccagctcattgtcaaacatctcgcctgtcggtctctccctgtctgcgtccggggtttcgggagtgggggtggtcctcgccgcgtcctgtagtggcacctgtccaaatgactcctcactctccttctcaagatggctcatctccactggggttggggggatgtcaagagtgcgccaatccggttgggtgtgctctgaactggactgattatcggataacgcgacggtgaccattgagtcgtggttaggcgcgtgcctaacgctgggagatgctggctcggaaacttccattgtgacgcgacagaaaacagagtatgttattcgaaggatgaaggatgtcgacgcgttatggcttgatatcggaggatagcagggttatttcaggcggattttcaactgcatagctatgcactttcccaagtccgagtattcaagaaaaaccaattccttccagcagaagtgggacctatgactctagacttgtatccagtacaagaagaaaaggctggggaaagggaaaaaaaaagaaaagaaagggagtcaggagagatcccacctatttcgttagccccccctttagctttcccctcgtggagtctcggccccgtcgatcatcctcatacaccgactgtttgaccattgaaatgaatagattatggcatcttgggctaatacggaggagattatattgtaattaccttatatcaaatatacctaggtaagataatccgaatgctagctacctattcatatctgttcttcccccacaccgaaattgctaagggattttgagtacattgcactagtacatgtactatatagtacggagtacggagtacatacatagtactggtacttagtatgctggaaattatgatgagcgtctctcgagtcgatttatttgaactgcatattgcctgcaggtacgaagtacagccacccatgtttagaggattaaaggtcaaaggggaactgtgattacacatgtagttaccttgcatctttgatacacctagatgctcccctgtaatctttcttagctttcattggctaatactttaaattacgcggactttattggtggaaccccttggctgatattgaaatacgattaccaccccctgacttgtccgtctcatctcaatattgaggctggccaacgttcttgcacttcgacagcatatatcattaattgacttgaaaggattataactagttatgtagacttaatttctatttctgtactcggtgctaccccttgggctcgcaccgtcaactactcgcagtgatccacagagtgtggcccatgcggtccgcctgtcaaagttaggagggtttccaacccacttttcgaaacttcgaggaatttctcggactccaatgttgtaaggagtacggagtattagaccagtcgttgttcaggacagcatgccccccagcggactttatttttcgttttccaggcggttgggttattttctccgactacatatatacatatattggggtggccttgatgcttaaacccgctgaagaaagacctgaaaaaatagaacccgagttacagcatgttaaaccaatggctattactatccatggatccatggataactactcgttgattatatcaccgttgattactagtacaacctaaggttgttgtactcgcagtggatttactacagatagtacggaatactatataagataagcgtggatatttctttagtatgtgttccttctggtgagtagtccaccgagcataaatcactcactttcggccatctgttacaacatacactgcgtataaagaagagggagatagcccaagcctcatctacatgtcaaaggagagaagaaatagaactcagccagatctgagattcgaaggaatctacactggttttaccgggtaaactatatttagagctttgctattcgcgctaacttcaatcatgacatttgagtaaaagaagacaatggatctctcatttcagagatattccaaggtcatagtctcgtagaccacatacagatatctgactgcatctcatattcctatgaaatgacgtgtgaagatgcagcagagtgaggggaagattgttttatttttccccgtttgtttgtgaatttcccctttggggcgcgtctgcaggcggtgagggaagaatgatgatccgagtggctaaaactgcccaccgccccctgtcagtcgcgacttccccgggcaaaaaaacaacaggtcccctccgcgtattctctctcttctctttgcttctctctttactcttttccggcctgagcatgccggagcttgattgatccgctccttgaaattgaaagattgctagcatcattcatttgcttcaactttgaggacttggactcctttctctccatcgtgcttcatcgcgctccatctgtttactcgtattgatcatggatgactccatgatggaagactcggtcttcgaggatgacggaggcagctctgactttgctcccgaacctgcaccggtatgaactcactccgttaggccaccatcagactcaactttgattactgacattatgcgtcctcttagaaacccaaagccaaggctgctcctaagaaagctgccgccaaacctgcggccaaaaagactacacagaccacactaaagaccaagcctgctgcaaaggcagctgctactaagaagaaggctaaggccgacagtgaggacgaaatgtctgatattcaaatgtccgatgatgattctctgctctcccgcactcctcccaaggccaagaaaacggctgcgcctaagagagctggctcaaagcctctggccgatgtcgaaaatgagtctcatgggggagacgctgctgctgatagcgcgagcaagagtggagatgcatcagagaagtaccagaaagtaagttgctgcattgcctctagcgtaacctaatcctagccgggacactaacctctattctttaatacagctcacccaactcgagcacattatcaaacgtcccgatacctacattggatccaccgaacgtaccacccagcagatgtgggtttacaactccggaactgagttgatggagttccgcgatgtctctttcgtccccggtctctacaaaatctttgacgagattgtggtcaacgccgccgataataagcacaacgactcgagcatgaacgagattcggatcacgattgaccgcgaggccggtgaaatcagcgtctggaacaacgggcgtggtattcccatcgagatccactccaaagaaaagatctacgtgcccgaacttatcttcggccatctgctcacttcttcgaactacgacgatagtcaacagaaggtgactggaggtcgcaacggtttcggtgctaagctttgtaatgttttctcgacagagttcactctcgagacccaggactcccgccagaagaagaagtacaagcaaacctggactgagaacatgacgaagatgggcaaggcaaagatcacagatgccaagggagatgactacaccaaggtcactttcaagccagactttgccaaattcggcatggagggcatcgacgatgatttcgaatcccttgtcaagcgcagagtctacgatttggcgggtacggccggtgttgctgtcaagctcaacaacacacgtgtccccattcgtagtttccgaaagtacatggaaatgtacaccaaagccattcgcaaggagcgcggtgatgatggccctcccacaaaggatgaaattatcacctgcagccccgatccccgatgggagattggttttgctgtttcagacggttcgttccagcaagtctcatttgtaaactcgatcgcaacaacctcgggtggaacacacgtcaactacatcgccgatcaaatctgtacccgcttggccgaccaagtgaagaagaagaacaagtctggggcaactttgaagtcggcacagattcggaatcatatcttcatttttgtaaaggccttgattgtcaacccagctttcacctcccagaccaaggaacagttgacgacaaaggctagtcaatttggtagcaagtgtccccttgatgaagatttctacaagaaggtgttgaagacagaggttatgtcaaatattctgcactttgcggagcaaaaggccgatcagatcttgaagaagggtgatactggccgacgcacgcgtatgaacaacccaaagttggtcgatgccaacaaagctggtactagggagggtcaccactgcactctcattttgaccgagggtgaatcagccaagggtttggccatggcaggcagagcagttgttggaccagacttgttcggtgttttccccctgcgcggaaagcttcttaatgtccgcgatgcttctttcgaccaaatttcaaagaacgtggaaatccaaagcatcaagaacttcattggtctgcagcacaagaaggagtacactgataccaagggactgcgatatggccatctcatgatcatgactgatcaagatcacgacggtagtcacatcaagggtttgctcatcaatttccttcaagcccagttccccagcttgctcaagattcctgagttcctcattgagtttatcactcctatcataaaggtttggaagggtgacccgaaaaacccgaccaagcagaagtcgttcttcaccatgcccgaacatgatgaatggcgtgaagctcaccaacacgaacgtggctgggaacacaagtactacaagggtttgggaaccagcaccacggaagatgcacaggtctatttccgcgacctcgatcgccatctcaaggagttccacaccatgcaagatggtgaagctgggcttattgagctggctttctccaagaagaaggcagatgagcgtaaagagtggcttcgacaattcaagcctggcacattcctggatcattcagtggcgaagattacatacaccgacttcatcaacaaggagctcatcctgttcagtatggcggataaccagcgttcgatcccttccgttgtggatggtttgaagccaggacagcgcaaggtgcttcacacctgtttccgccgcaacctaaagaaggacatgaaggtggttgagctggcaggtcatgtatccggaatgacagcctaccatcacggtgatgtctccctgcagcagactatcgttggtcttgctcagacctttgttggctccaacaacatcaactgcctggagcccagtggaaatttcggtagtcgactccaaggtggtggcgattgtgccagtgctcgttacatttacactcgcctgtctccctttgcacgcaaggttttccactcggccgatgaacccctactgacgtacaacgaagacgatggcaagaagattgagcccgaggtctttatgcctgtcgtcccgatgattttgatcaacggtgcggatggtatcggaactggttggagttcttctatccccaactacaatcctgaggatgtcgtgaacaatctcaagcgcctgatggcgggcgagcctactgagccaatgcagccgtggttccgtggcttcactggtgaggttgtagctgtgggtggggatcgctttaaattcagcggtatcatcagggaatgtggtgagaaggaggtcgagatcaccgaattgcctattcgaacctggacgcaggatttcaaggacaagctagaggaaatcatcaaggctgagaaggtgccatccttcatcaaagattacagggactacaacacccacaccaaggtccacttcattatccaactcgacgagaagcacatgaaggttgctctgactgaagggttggaagaaaaattcaagctgaccaagacgattgcaacaaccaatctggtggctttcgatcccgagggccgcatcaccaagtacgccaccgtcgatgacattctcaaggagttctttgtcgtccgtctcaaatattacgagcgacgcaagcagtttcaacttgccgatctacagagagatctggagaaactgagcaaccaagctcgctttgtgcagatgattatcgatggcaaattggtcatctccaagaagaaaaagcctgttctgatcgccgagctaaaggacaagggcttcaagccaatttccaaggtggccgaggcccctaaaatgggtgaagatgagcctgtggtagaggaagaaggagaagaggagtcggatgacaatgacactcaaaaactatctagctcatttgactaccttctgagcatgcctatgtggtcgctgacccaagagcgagtggagaagctccgccgccagatcggcgacaaggaaacagaggtcgacgtcttaattaagctgtccaaggaggatatttggacccgcgatttggacgagttcattcaggagtggcgcttccagcttgaagatgaggaccgtcgagcccgcaaggtggctggtctgggccgtcgcgtctcggccaagctggccactggtggtggtcgcgctgcggcttcgcgcaagcgtaaggctgctaacggcgatgatccagatgacgaagacttcggggcccctaagacgaagaaggccgccgcagccaagaaaaaggagcagcccaaaaacagcttgatgaatttcctcagtaaacctccgagcaaaccaagcccatccgctgcggcagacggatcggacgatgaattcgacatggacatggaggtgcttccgaagaagagtcgtgctgcatcaaagcctaaaactatgccgaaagaagaagacgactttatcgacatcgacgatgttccccagacctcacgcgcatcagctcagccagctgacgacccgatgggcgtggatgtggatgaagcgccaaagcccaaaccagcaaccaaggcagcgaccaagccggccgctaaacgaggagctaaggccaaggccaaggtcgaagaggactccgatgacgatttcttggagattgccaacgaggctcccaagcccgcggtccagtcttctcgcgctcgcaagcctgtgaagtactcagcgcctagcgattctgacagtgacaatggtgatgatcttcttggagacgttagcatgatggtcaaaggcattggtggcgactctggcgccgattctcgacagctcttctcggagcgtccgcgctcggaaagcagtgccagcgtgaagactgccgcaaagtcctccaaggtcaacgacgatttcgatccggatgagactgactacagcaagctcattcctcagaactccccacggcgctccattcaggtcaaggccaaggacgtcaagctcgacgacaaggatgaagacgaggaggaccagccagtcaagccgactgctagggccaaggctgggtcaaaagccaaagctgctcccaaggctgccgccaaggttgtagaggtcgacgacgatgatgacgacgaggaggacgagccgatcaagccaactgctcggggtaaagctgcgcccaaagccaaggctgctccgaaggccgctgccgccacctcggccgcgaaggggcgtggtcgccccaagaaagagccagctcctaaacccgcccccaagtctgctcccccgagtttatcccctgcggccaagggttatgcttctaagcatggcaagacaagcaagaagattgcggatgattactcggaggatgacatcgacgcaatggccaacgacattttggattctccagcgggcaaagtgaatgcggatatctcggaggacgatgagcccgctcctgccccccgccgcgctgctgcaagccgtcctgctcgtggcgccgcacagcaaaagaagtcctatgtcattgaggatgtcagcgaagaagaatcggccgacgatttcgatgaagacgaagacgagagcgactaagtagtgaaatagtgaggccagggggccatttacgatgttctcttgttttgcaatgctctctgttgtgtttttatttttctttcatttccatgtcttagtttgatattttagggagatctggcagagccagtgcatgcaaggcgaatatgagatcttttaattttcaatcttctctctttgtaaatctattatgaggtatctgatgttgctctggaattgaagaccattcagattatacgacaaatgaggttctggcgcggtaatgctggtagacaaggtacataaacatagggcaagaattcataagatacatgtaagagcttcagtttccctttaacacctaacaccatccagtctaacccattgcccgtcataagaatcatcagagaaaacaaagtagcattgtagcctcgaacaggctgtttgaaaccccccaatgtcaactagcccatcaagatcctcaatcctgttgcatcaaataaaaggaacactgacttgaacaagcaaaccttcaactccaaataaagtcatcaaatcagacaaagttcctcacaaaatgcatagagacagcaccgcacagaaaccttccgctgcgagacccataaacgccattcccatgtcaaatttgcagcgcagtcggtcatcaaagcgaagctcggcgtcgcttacggctacgagactcgtcaccatcgagagagcggcagtcaggaggcgaggtcaactcgtcatcgtccatctcagtctcggttccggtgctttcgagctcattcatgtgcagacgaagaagagcctcagcagcctttacctcacgggtgaaatgaggcgacggctgaggacgcgcagctcgagacttccggctggggtacttcttagtcagggatgcaggacttgtagagccgtccttgccaacgggagctccaacaagagtcttcttgagagggggtccgcggtagtcttcgtcatcatcgtcgtccatttgccaatcatcgtccgagtcagtgaggtcatcatagtcgctttgcgtagcgaccacctccaaagcagggttggtgggctcgtcgaggccagcgagcttgtcatctaccggaggggagtttggagtggaatacatgttggacgagccatcactctcggtttcactatcgctgataccaccagggacattctccgggcgcatagcatctgagatagcacggaggatggcccggggtgattcgacccgggagcgggggataacgttagagctgcgcggtgggttgatgggtgtgaaggtagacatggacgactggctcctgggcgacatgcagtaaggctccatagaggagtcccgggcactggggttactgtcggcgtatttggtacgcggaatcttgagcgggggaagcgtcagggaggagtcttgtcggcccactactcccataccacggagaagggtatgtgttgaggaaggtgcattgattgcgggagggttggctccggcgctagacttcatctccaacgagcgatagtagttggagaggttggtggcacgctgcacaatatctggggggatgaccatgcggccatgagttttgcggtccgttggggggatacacatggccgggaattctgtgccaaacagtggggtcagggcgtatcggattctccagcagaaggtggctgccatggctttggcagcttcgtatggcatccagtatcctatgtgagaatcatattagatatagtcttcaagtaatcgatttgtatgagaagacggtatagagagcttaccttgagcggaaagtgccccgccggtgatgctgtggcagatatcgcggaggccggggttctggtttagcatcttgcctggggtagtctataacgagttagaaattccgagtatatgaaagagctaccttgtagacttgccttggagtagccattacacttgaacaggtgtgtaatccgaacgatgccaatgttatagtcccacataacatgccattccttttcctcaccggggatttggaatgtgtattgaaagactagatggaagagtcagatgtgaatatcaaaggcaggttcaacggcacataccatggaagctatctcgaccggtcttttcttggaaggttttcttgtcgctggcataagggatctgacgtggatagtcggcaatattgccaaagggacgtagcgagagctctcgatgagccttctcgagctccgcgtctctttcctcgcaaggaggatagcggcactcgccctggatcttgccacggcgaaagaccggggcatccttggccatcttctgccgtttctcacgtgaggcagggaaggacggatgaggatttcgcctttcgggctgaggattcaaaagggatttgatagatagcattaagaagttcaagtgctatccttgaaggaagaagggttgaagaagtacgaagtctccgggggaaagaaggagcttaatgtctcttggaacaagaggcgttttccagtactgaaagacagaggtcaaacatacaagaaacaaagtaaagcaagacaatccaagacctttgttcgaaggtttgttccgtacagattctagaggtaaggtgagtaagtaaagtgagtaaagtgagtacagattgtttgttggcacaactttcgaggagacagaggcagcggtgaatagacaagaactcggtctgacagggaaatgggcttcaccggtactttctctctatctccctctatatctctcatatcagggtccttgaagttgtgaagttggacgagtccactgtttgtccgcgtgggaaagttcccatcttcgactttggactgatgatgcagtgtcgatttcccctggaagcaattacaaaaataacacatttgagacctgtgtctctcttctctctcgaggcataacctgtttcacattcacaaactgtgactacccaacctccaaagagatcagtgaaagagaaccgtttcagagaccatgtggatatcctggattccattttggaaacgcagagagtcaccgctgcatgcaaacagcctgttgcggtaagatatacgtacaaaggcctactatattatacggtatactatgaatgccctaatatcccggggtaaagagctcaaccgttgtcccaccatctgtcatttcttcagaatcttatcgaagcacccatgccagatcttccttggcattgaagtagagacagagtactgcagcatccggagcattaggataccagtttaatggcccaataagaagttacatgccatggtggctcgacaggatgagcatcaaagaggtctcagactcacggcaagctgcagggcgacttactccttgtataacggaaagctgcattacctagcgagtccgcgaagtgcatctgagaaaatctgtgctgcgcagataaacttctgacatcaaagattctaaagagtgacaaggatcttcacttgggtgccacgctttcatgcctatacagtgtgcactaggctgtacaagactatacatttgatagatggggtaaggctgaattgatacggattctgagcatgtcagaaaggattgcagtggttcgttgctattgaatacagtcttgcacttcactacttctctttttttccccttctcgattgaatgcccattctaagtctttggacttttttcgactagaccgctgattgacggcgtgcgtataacagagacatggactttccggaggcgcaagagacataataacgacttcaaagaactttccatgcatccttctatgcagtagtccgacacgttggtggctgttagagcccacttttcctgtccgtatctcttttcttttctcttcttgaactgacttataccatagtgtcacactgacttctcccagtccgtttcgcaacccgctattgtacccacctgcccgtttagtgtagtctgcataagactttcaacaggtacaaggggtccatccgccaatcggtgccgggccggggcagcattacagagcaccgcagaaaacggtgcatatagacgccggcaggacggtatgcaatctggtcagagactgtaaaggtcgaggactgaagtgtcaactagatgtcaacacaaccgggctagttttcgagggggatgggctcaattgcattggagtcggtctgcaaagagtcccaacagccgagaccgggagagtccagaaacgaggactggtttccaatgtcttagacactctggtgctggctaaacattctctattaaaccccaaagagcggtaaacccggacatgcgtgtcccccatctgcgacgcgtctcagatcccgggcttctggaaaaggggcaagaagccatgtctcaattgggatgctgctgttggtgtttaggcccttctcaagcggttatttcccttcctatattcatttccataaagtataatcgagcctcttagtaacattcgactctttcaggttgcccttggaggaaccctcttttcacatggttatcaagaagtcgacagactcatcgttcaggtcagagctgaacagctcttgaagatgctgtatcatgatagcaagatcgcaacagtggacaaggaatacacggagcgtcatgtccacatgagcctacaagactcgatactaaatccaagttccaaccagataaaagactcacttctatcacaaagaggtccagacctcgacccgttgaacacagaatgaaaaccggacccgaatccccacttcattcaagacgcttgggattcacaagatacccctcacccgcagatatcagacaaaacagtccgtaattctgtatcacagtcctcgaatccggggtatatggggagagatgaaggggaaacacagttccgagcacgactgaacaaggcaagtcttcgagggagaggggaagtacaatgaaagggaaaacagaatcgtcacaggccggcccgaatcgcgatgcggcgaatagggagccgggtcagtggaccgggatgaaactcaacggctgccttgcactgttgggtgatcaaggccgcttgcatgggattgcgagcaactacccaagtgggttgggtcgtggcattttgtgcattaagatgggagtcatgacgcacggatatggcaggatgtagactggatctggtttcctggtgagtagtacgtatacaattcgtgatagttgcctagatggtagtcgaggtccctgcgcgaggctcgaggacgggcacactgcatgtcttgattaaggatatatggaaagccaagtgaaggacatgaatttatgtaaatgtaattccattacaaacaatatgaacccgagaaagacatagacaaggggcgtttgaagaaaagaagtagacggataaaaatgtccagtgtgttagggggtgaataaagtgcgaaaaggggagacaagagacatgacagctcattcatcgctcaagaatcttcctttttttggggggttcgtcgtcgacacgaggatttggcgactagagcctatgtattcccaagggatccccaaccagaacaggtgactcaaaaatccatctcacgtgccattcggcatatccagctgctgagtgatcatggccacaataatgatattcattcaccaaagaatatttaattgatgttcaagtttgaggtcaattaatattcctggtcaagatgacctagtattattgagacctacttaaatggccagaagaggctcacggtcaccggcctgctctgccggctccacggacgcaacaatgtcagactcggaagactgagcgacaggagcggccttgggagcctcggggaagtcctcgtgcttgacggcgggctcggcgacaggggcagtgaactcgggaatgggagtcttggcagactcggccacggtctcacgcttgaccgggctcacgaccttggtcgcttccggggaggcagagcgtcgggagccgatgataccctgggccttggagctgtactcgccaacatactgcttcatcaagccggtggcgtgcgaagtacgctcgccagccatgtcacgaagctggttggtctgggagttgataatctcctgagcgttgacaatctgctcatcaatgagctcacggttgctgatgtagacgaggggggtaaagtatgtggtggtcacggcaatcacggccaagccccagaaaggaacgaagcggatcagccagtagccggtgaaagcagcagtgaaagcctgacaagccgttagtttctgccttctcgttcacctccgttctgggcaagttggaacctaccaaaatggtgtggagaacattctcagcgaacaggatacgctggaactcgatcaggaagaagtccacaagctgctcgaggtcctcgaggacagcctcgacggtctccttagggatagtgtagtaacggcgggggcggaatccgctggcgactccccgcttgaggataacttggccagcaacctcgacggtggcggtcactgcacacaattgttaaccactctgttgacagtgggtcacgcgaccaactaactcacctcccaaagacatgtacaagaacttgaaggcccatcggaggagaggcagataacgggcggcgaagatgaagcatatcacgctggcgtaggagacggcggtcgcgcggggttgttcccactatacatgcacacacagattagcaagctatccaaattgaagactcgggcgacaactcacgctcaaaaggctatacatcaaagagtggtagtctagacacttgttaatatccgacccaaccaaaccagttctcatgacatacgggtcaatggttgaccatcggcggtggtggtcgaaggggtcacacgcgagtttttcagatcgcgaagctcatcgccagtgcgggatgcttcggacttcacattatcgacaactgggcctataaagaaactggtcagcatgctttggtggcatcggagacttccggcttcctatttacccttggtaatagcatcactgatgcctgaaggcaagaggggtcaaggtcagtttctcggaatctaggaaaaagaaaagagcatgctgcagggtcactattagcttatttatcctgcaggattgaaatgatctgttgattttcttaccttactgcccgtgttagggtaggtcacgtcaccagaagccatgacggtgatatttgtggaagcacgtcaggggggggggggggggggtttagaagcgaaattagaaaattcgtaagattatcaacggggtcggaggcgtgaatcctagaaaagaaatgaaagtgggaaggggaaagagaaagaagagaaacagaaaacagaaaaagataagggaagattcgacttccaaggttgttgtgatgctgtcatgtgcgttgccaagcccgaacagctatctcacctgggcatctggatatctgggcatctcttgtggatgacgaatttccaagctacctaggtattaatcttgattttactggagaatatcctttattgtataccaactggaaaatatatgaataatatcttgatcttggtcaatggcactcgacaagcatataggtgcatacctaggtagctataccactttcaacactgttacttctagccttaatgtacttttgctataaaattctagttctagcgttcaacttccatgttatacaagctatacatactccgacgtgtgtaatatagttatgacttcatgcacttgtacaaccaatcacaactctacaaggacgaacctcggctatacctaactctacctatgtatatgattatagctacactccgagctgtaaggatatgtatacctaggtagcctttagaagctttttaagattagtttcttagtctatctctcgaggttgcctcccttaaaccgtttcctaatgatctggttggggctaatcgaatattttatatatttacagccggatctgctattaacatgctatataatactggataatagcctaatgatgaaacagggaaatgactaaaatactgaatagtagtctacaacactctataaatcaatcccctaaatataacaactgcgattgttgaccttgcggtaacgtgtcagtttcaatttattgtgaacggattatttattacatcattgctccaacagtccactggtggtgaatatccttatgtaggtaaacatgtattcacgaggtgatggtacaaacgtatatcgtaagtgcagttgatcctattgaatacccccacttcacatttaccgtgacgtgtgtttaccttgtttcttttaatattccgagactgattcgtatttaaggggttaaaagacgtccattcttataacatgctgtagggaaagagtggtttggattatgagcaatatgagcaaccaaccatcgatagaacaggtattgatcggaaaaaaggtctggtcgatctatgctatgcacagactaaccatcttggaatactattttggggttaactcaagctatatctatggctcgtagtgacagaattgacttatatcgaattttcccgaaatagctttgatttcatcctctaagatgagctgtgtggaaatgatctgtgttaagctgtaatcacgcttgctctctgtctcacctatccaattcgtattgatgttggtgttgaagataggacgtattgcctgaatcccaccctcacctaaggaaacatcgaatccccgtagtttctggccgtagaggttgattgttacttgcttccctggtagccgatagccaaaaatgatattcggggttcccgcatctgcacttatcaggtcaaatccagtgatatatgtcttcgatccttcaggtaagatagacacggccaagccgataatgttttgtagtgaaacagtttgcacaacggcatagtggtatgcataacaggttcggcactctgtgtgattttgcccctgttgggcagttctatcgcatcgcatcttagtagaagcctccttccaggatactccactaagcaaattattgtgggatctaggctgatcgtccaaggctttaaccatcgaacacctatctgctagccattgattgtttctccaaattcggcgtatagtccagagttgaagatgtggctggtctatccttgccgtgcaatggtagatcgatcgccagttcttccttttgcggttttggggtgcctcggctagataggctagaaacccgcggtctccgtttactcggaatcttgtcttccagaatgactggagttggaaaagaagtgccatcgctcgggaggcatatcgaaggctgaagaaatcgacagtagaaaggtaagctgcgatttcaagccgtatctccatcgcgagtaagccgaagcagtcagtcccagaagtcgggttgtggctagagtctgtatttttccgtttcattttggggagttttctcgtggcgtctccaatcccccggataataggtcgttccagaggatgccatgggaattccttacccctgggatctagcactatgtgcataggtgtcaatcagtatgattattctcgtagggataaaaacctcacctccgacaggtcttgctgagccagggatattcttgcagacttcgaaaagcctatttaaatcgacctctccgtttgcaaagtgcttaaccaaggccgaccaacaagactcatgaaacaagaaagcctcattatcctgtgccttatcataccaaggccatatttctcaagatccccatcactcggggaacctcaagatactcttcaagccagtcaaagtcggttacagcaacatccgacaacttggctccgtcgggggttaaatacactatgaatgttgagtttgatgtaatacataattctatgtcccccatccactgtgaacttacccgctcgataacttgccatccaaggataatcggaatcgggcatgaaaagcgataaacaagagaagcagagaagataaggacatgggcttgttttggacaggggcaccgtgggatatggcgattcagagtccatggcctgtcagatttcgtcaataggattataatcgaatatttgatacaaggagctgattacaggggaaatataaataattaggtatggagcgatcaccgtgacatcaacgaggaaataaatgattcatttccttaaggttggacaatgcacttccatcgaactccatatgaggcaatatttcagagcgtaagaagcaaagaaagatccgatggatgaacatctaggtagtgctctccactatcggtatggaatgttaatgatcgccggaaacaagagaaacaaagacaacggagaaagtgtgctcttgctcaatcctactcgttctcagcagctaggattacatctaccctccagatatccctcgcgagcctcgtgatatcttcatgagtcatgaggaaatcaccctctctatctccgggatctcggaggaaaaggcttctgaagggtatctcgaacctcccaccaatgataggatcctgactggacgatcgtggtttttcgatccacattttttgaactggggctgcgacaactcggtttgggtagtctttggtaggcttatgccttagcccccacttctcgagactgatattccactccacagatcccgatagcacattttcgggccgattacacagcggtagtgcgagctagagccggattatcaaagatatcctgaacagtatcctgaacagtgagggccagcttctcatgcgcagccaacgtggcaagttgaatcgcactgagtgaatccctgcccaatcggaagaaatggtcctctcttgcaatttcactggtttcaagaccaagtaccttcgaccacattctttgcatcctttgctccacgaaggtgtctggaggggttctcgactgcaatgctgtggtcgtcgcctttgctgttgttggaggtgctcgcaaagcagctaaatcttgacgtggaagcactaagccggtcacttgaagctgtcgtcggtcagttttgccagatgaatgcagtgggaactgccagagaggtatgtagacagaaggaaccatgtactgtgggagggtcttcaggagagatttgttgagatctttggttagatcccacatggcttgtcgcagctgttgtgcatcttcaggctccgcagattcgatttgactcatagcgaggaaaccaaccaaagtcgggcgacctccagagcccttgctggccccagtcgtgaccagctccacaatagggttaacccgtttacccgttcgtgagtacaattgctgttggatgtgatgttcaacttcgctaagctcaactcgttgcccgcgcactttgacctgggtctaggctgcttcgcatcgagaagcgcaaatacacccccgactctgatcgtcgcaaggatggccacgatcgtctatgccgatttcttaaaggacaatggaaccatgacttccgggtcccactccccggctcttcagctcatctgctaatcgcgaagacagatcgttaagctccgcatacgtcagattaccgtcccaggaacacacagctggggcgccagggttgacctccacgttatcgtggatgagcttgtgcaccagattactgatagcagctggaacagttttattccattcccagatctgattatagtctcctttctctaggtcttgtatcgtcggaccattcccgactccagtttcgtgtgccattttgttgcgtctgtcgcaaggacgtgacaaggcggatcgaatcaaagtcgtaccggttgcagcagccacgtaaaagcactagcaattatagaataaaatacttcgatgctccggcttcattgagatgcgtgatcctcatgccagcatggcccccgaacgagttcggtccactttcggggcataagaaatctggccgagatattcggggactggttcgctcgaactagattgataaaaggatataacacagatgtcagttccgaaaagaacagatggggtccatgatattctcgtcagaaagaccatctcggagctggcaaggcttgcgacttcgtcatcagaggcagcaaagtcgaccagcgagctttaaaaaacaagttgccgcagacattcctctcaataccgtaaactcctcccaagatgggagtgagacggaaggtttgtatgacacgattctcagtcaagcttggttgaaagcatccagcgtcgaaagagttgtactggcttccgactatcaagtttcggcattagagcagatgctgctgaatttccgtggtgacctgacttaccacacgttcgatatcccgaatcctgtgaacttcaaccgactggccttgtcttgcgttgaaattgtcaatcgccatcccctgctgcgtagtgtcttcgtttgccatgggcaccaggtctatcaggtcaccatgaagtcgagtttcattatatgaagcattactttgcctctacgtgcgtcctctcaggtatagaaagtcccatccaaattttatcaaccaggttcaagggagaatctattactctgactatgagtactcctaaagacagtgaggtttctcaagcgtgtgttcttcatatgtatctccttctcaatcgaagttcaagttccaatgaaaacgaaaatgggccataaacaaacaatcacgtgacccacgcgttgccatccccgattaggtctgttttgattctcgacatctccattccccgactcagcgcgacccacaacccacgaccttcatgattgtgcatttacaatttaacaaccctctacgccggtaatccctggttttatttcctacactttcaccaacggcgcattgtccagatcatggcggcaagcgcgagggcgcaaaagcccgtcggctcagcgccatggatcgcagcagagaaggaaaacatggcagagctagtggagcaagaaatggaagaagtggaataccctgtgcgacacgaactggactggttaaatgaacatatgaccgagatcctgtccaagggccagacgtgagttgcacacgatctaattctataattctatgtcttctcagctaacaatcacacaggaacttcgcggacgtgttcaagacgcccggaaagatgagaggtaagacgcctcgaaccgctcggaagcgcatgcccgaagagtctcgagtggtaagtactctccatatcgaatagatttcaacagttctcgtctaatgccccttgcagcccttgagcgaaatcttctcgtccgcccagaaacaattggaaaaccatgcgagcccgagcccgtttattcatcgtgttgtttccaagcccgctcccgtgacggcatcgcctgtgccccgcaccaaaatagtgacggagcaagcttcgcaacccgaataccccgatctcacacaaaatctgaactccttccccacacacaacactgactctggctatcatggcatgcccgatgatgatgaaatggtactgcctgacgtgcaacaagaatcacaggcttctactcagccttctacccagccttttgaacaggacgagcccatgaatctggatactcaagaggtcgacatttcggccagtcaacaaacgaatgaagaatccttccactctgcgcgagaagagatccgctcccgcggacagactgtcgagccgatcaaggacccaaccccaactcaggaaagcacatcgcgtccagccgtatcggtttccgaagaatctgagcgtgaaattatgtcgactccgactaagaaaactaaatcgaagccagatggcaaaatcccggaaaagcaacagaatgaggaatctgaacccgaagagagtgatacgccagtctcaaaacctgagccatcaccagaaaaggccccggtggccccggtagctccacctatcgagacgcaagattctcacccagaggacgaggatatggaagaggccacgaaagacgacgcagttctcgacagtcttgatgatatcggctctccttcggatggctctaccccagagcgaccattcggtcggaaaagcagcctgagctttgccaccctccctgcgcgggaacctttgaagactcgaataagccatattgatctggcgaaaacgagtactgccgggcgtcccagttacttcggcaggcagactggcggccataggattccgcaccctgcggcagaggacactaccggctccagggcattggaaattgacaatgagaaagaaccaagtgaagaaatggatcctgaccaggctaccaggatgcacagcaaaaagtccacccagtccttgcatgaaagaatcagcatgctaggcaaactccagccatcccgacccagaaagtcaatcccatccgcttctgcgctaccagctggtcaggttccctacccagaccttccggcttcgaaggccgaaacaaaatctgaagctttggacgaaagggcacgtgaagccccagctccagagcgtatgtctgtggacgatgactggatcaagccgctgagctctcctcaaaagcctgagctttccaagagcaagaccacagatgtcatggaaaagcttgctgaattcgaaaagtcgcatgcagtcaataagaaagatgctttgcaaacagagcctgaacgacccaaatcatctacctcgatgttctcttcaccccgacctcacggtcaccaacaaagcgcctccttttctcatactcctgtcgatgcttctactactccaacaggctcgccaagacgtttcgacggtcacatcagtgcttcgaagctgaaactgcactcgattatgaaatctgccaagggcctgttttcaagcactggaaacacaccacggatggaacattcatcgcctgagcagacacgcattcaaccaagtgcggacgcattcactaagaataccaaacacctctctcaaccagtccctatcaccagtcctcaacgtccagaaggccgccgcacacgaagctcgaccgagaaagaagaaaaacggcgccagcatgaacgggaagagcaggagcgtgaggatcgagaagaagaagcgcgtgttgagagagctcgtgaacaagaaaagcaaagagcccttcaactcaaagccgctcaggagaattcctcggtcgagccagaagagagggcaggctcggcagtatacaagacctcccagtcgcagcgccagcaatcgcgggaacctgaatcggctcaggagtctagctcgaggtttgccgtccctcaaccgaaacagaatgaccgccgtcctctcaaacccactcgcgagcccgtgaaacgtccaacgccgcaacccatgtcaattcgtgttggcagcacgatgtctcgtcaacaaattcctgtcccatcatcctcgggttctcaggagtcggttgtggccgcagccgcctctgtcgctgcttcgaagccaactctcaaaaagaagggtagcaacacctccttgcatacagcatcttctgcgagcagctttaagagctctgtttctagtcaaacgcaagcccagcgcaaggctcaggtcgccaatgaccgcaagaaggagcaagaacgcgaggcacgtcggaaggaagaacaaaagcgtgatgtcgaacgcaagcgtgctgccgcccaacaagaagaggcccgtcggcaggagatgaggagtcgtgctgaagctgaacgggagcgccaagctgagagagagcgtcaagccgaaagagagcgccaggccgagagggagcgccaggctgaacgggagcgccgcgaacggtcggctcaagaagatccaaacaaagccgcccgcatggaggcaatcaaaaagcgacaagcagagaatgctcgcaagcatgggaggcaaggcagtcagcagatagtcaatgaggtaagcgcgttatttcaatcggggttcttttctttactttttttttttttttctcaaaacgctaacagttcctaggggccaattctgcagcatgagcaggcatattctcagtcttctcagcgaagtgacttgggttcttcccgccctccttctcgcttgggtagctcaattcagccatttggtggccgcagtatcaacccgcccccgcctaatcccgccaaaccgccaaagagaggcaacgatgaaaccagccaccgggctgctccgtctaagcctagtaatgtgcaatcaactggcgaattcaaacggcgaaagacagaggatgagcacaaccccatgccacctgtacgcacaatggcgcagcctatccgccaatctagtatcagaaaggttagtaacatcggattccatgtaatatcctgacgaacagattattgacttcaggaatctatgaagccttctacccttggccgtggacagtcttccctggcaccccagtcgggttcttctagctacagaaatgctcaacctcagcgacctgctcacccgatagtcacgtacacgaacggcaagataccgtttgccgaaccaaaccatgcgcctccaccaagcacacataaggctgcgccaagttccgccccgcgcccgcccaccaagccatctcccaagtaccccagtggtgaaaatatacatttgcccgagatcaacactgacagcgaggatgatgacgattccgactctgagatgttccctgtccccaagtgggcacaggcgaaggagctggagggtcttctccggcagcaggatggtatggaagttgactcgatcttcgggccaattgcaccattctctcttgaagacacctttaaggcggacaagaaaatcaagaaataccgtgaccgcaccagcagtgcgaactggtccggacctgatgggctcactcaagaggagattcggagggatgttgccgaacgacagcggttgcggctcaatggtggttggagcttcaacagctagtggccagcaggatagcatcttcttttcttggattgtaaattggtctgtatattgagcggccttcgggggagtattgatttggtgccggacgtggttatgtccgtgttacgggtgtatcatctaggttgtggcgttattttgtattgttcttgacacttttatggtcttaggcaacagctgcatagttgcatccatcggtgcatggagttaatgaattgttattttggcctatgttggatgttcccttggtattttgttggagttgatatgaatgtcaaggaatttaagtggaaggatgtgggatactctcatgtaatactatagggctatccctttcatcacaccagcatcattggtctagtggtagaattcgtcgttgccatcgacgaggcccgtgttcgattcacggatgatgcacttcttattttgcttttgtcttttgaagctgttacttcgtcctcagttatttttgggatttattccttcgagattaagattatctctttatgcttctttttttataacctgttctatcctattagtccaatgtagaatgttgttttcttttcgttgcaccctcctggtgagtatatatatagtctaggcacacgccattgtttcaacccaatatattcagtgttcaacaggtatatatctagaacaagtccgaaaacaaaacccaaacaaacaaacgtgtaatcggtgttttatctcccacagtgcacctgaaggtggatgattgacatggtggttgacgtacggacactaccacgaagaccggacacactcccatgcccccataaataactggcctagtgttgtacaactctaattaaaccgcaaagcagaagaatacatcgcacatgtgcattgtctatgtatgaatttatactcgtatatctggcgcccatttgcgcaacatacaccgtgagattgaaatgagagagaaaaagaaaaacgcaagatgaaaacccgggtccaaacccaccccccggcgccgaggaaaatataatacaagattctctagcccctatgcagtaataccgacgctgggccagaacttactgcatatccggctcgatctcactagctcctccctcggcagcctcatccatggcatcggggttgaggttggcagcgtcgggtgccacaccgatttctgtctcgtaggagatggtgcgccagccagatgcactggtgggatccttgacatattcggacatggggaactgctggatgttagaacgcggttcaaagttctattttggtgtataggtatagactcacgtaatggtcgttcttcttcatggtcaccacccagggaacgttgtcaaaggtcacagcgcgaatacggaagtattcgttatcgggaatcttgcggacttcccgaataaagctatccaggtctggagtcgagacgctgttaacagcagtgaggaaattagtgggcgcaagaccgtagtggtaagcaggggaaccacggctctgaagaatagtgttagcagtattttaaaggatagaagggtatcgaaactcaccctcgcgctcacgtagatctcgctgtgaaccttggagatctgctgacgaacagcatggtggggcttctgtaggacagcaccgcagaaggcaagggcacggtctgtctcaatgtcctgagttggcaccgtggggacacggatgcgcatttcctcgccatttcgtatgaccagcgcatccaggaattccctttcatacataacatccagctctgaaacgcgggtgatgacttggccatctagcgtgagaataatgtcggcttcctggaagctggtgctggggtcgggagtgacgcctgccggagggctgtcaaccttgcgcaccatgaacagctggtgtcgcgatgggttggcctcagtgactttgttaatccattcctgcgaaacgcccatgatgcgagcctggctcatctgtacaacatagctttccatgctcaggattcgcaacgtcgggacctctccttgctggatcttggaagtaatgggaagcaggtacggggtggcaaggccgaggtggtattcgatatccttgtgggagcttgcagagcgctcaccgaggtagttcaaccacaaggcctgaacgacaccgtcttcgccgatgagcacaccgtttgaacattgggcactgagtccagtatctacggtcacggcgtccaagttgattgcacggtaacgaggggcagctgcgttggcggggatcgacacagtcgtgatatcagtgacagtggttttggccacgacaatgcggtagttttggttgaagccgacaaagatggtatcttggatttgtttgatgtagttagtgctgagctgggcgctcttaaccggagccttgacgaggctggggtcgtattggatgacggtgtagttctgaagcgggtgcaggaagaccaccttagcactgacaatgattgagtcggccacagtgatgttgatgtcgcaaaggtcgtaggggacaatggctcgtgataccaccactagacccttgtcagcatcgataaccagtccaaacccagtcttctttgcttgtgggtatccatccagcttcaacggcatgatgcaggatacgcgcacgaagctacggacaatctccgcggcagcaggctggctgatgccgtctaattggatgaaattggcttctcttgggacaggaggttcagcaggaatgggttcggcgatatcggagaaatcccagacaccagactcatcattccggaccgccaaccgcatcttgggatgccagtgacggtcaacgtagatgatactagttcctttcgtgtgaaggtcgcgaatatggcggtaggagatcaccacgcgagtgcgatcgggaatgttcttcatgacctctacgaactcattgaggttacggacgggccgcttatcaattgaatcaatgatccaccctgccacagtgttctccagcttgaaagagcccgccgactcacagacatagactccgcgagtggcaattgcatagagacgtgactgttggtacgacaaatcatggaagctggcgccagcaactgtcacgaaacgatcgggggtgatatcatgcagatttcccacttgacacacaacctcaacgtcttgaccgcctctctgaaccagcagcttgacagattccccgacactcgtgtctaggatgtcgtcgagacgaacaaactgcgtaaggagctctccgttcaccttgataagcacgtctccctccaacaacttaccatctgcgggtccctccggaaggatgatctccgcagcaagcatgttcgtttcagtaggtgctgcggcacgtacagcagcctcccactccggggtcaaaccaaggcggcgacactcgtcgaaaggcctcaagacccactgcgtttgaattgtaccacgagtaactggttgaccttggcggatacactccagtgcacgaagcgggcggtccagcggcaaaaagtagtccgttgcagcaccgtcagctcgaccaccagcctgcaaagcaactgcatggccagcaagattgaccacaggacttcccgaactaccgccgctggctgcagctgcggcctggatgtagtttgtgttgaaatcacagtagccctctccatattcaggcgcatttcggtccagtcgactgatcacaccggatagaatgctcagtttttctccagcatcgttacccacgacgcggatttctgcaccaactcgcgctccatctggctggagcttaagctctgtgacttgcatgtatcgaattttcgccgggtcgaacttcaagataccgaaatcatgaacgggatctcggtatacgggctgaacatcgcactgtgatttgccaattttgttaataaccaaaggtctttgaccaaaccattgtgcaagatcgacttacttcctcgtgattgtcaaatatacagtatccccagaaaggaccagcacccacaacgtgacgattggtcaatatgtagccacgctctgcatccaccacgaaaccagttgcttgactggacattgagagctctgtatcgaacgaacaggtctggcagaagtgaatggagacggcacatttcacgaccttctcgatagtagcctgccattcaggtgagtccgttgtagcggggatggcaactggtgagggagcttcatctacatcctcctcgatctcatagacagttccgttggcgggagttgcgtcgtcgggggtcaatatcgagggctcaggtcggagttgcttgttcggatgctcggaagtacaggccgttgtgctgcgctttcgcttcgcactcatatcgcccttgccatccatggcgaagatatctgagctttggaggtagtgtcgacggggttttaggtggctggcaagagacgagattgaccgggagcctcttgaggctaacagggcagcagagaatggggtatcagacgaatgagacacgtgaagatgcggtcgatgcggagttaaggaatgtgacgcaggtgatcgatcagcggcggctggagacctcaaaggagtggaggtttggtttgcgccttgataagacgggaaaggcaaaacgggaacaattcgcaagctccttctgcatacaacggataaagaacaatacatccaccaggcaattggggaaaatgtgcatgcgcgttgacatcaaggcaaaacgtgccctccagtaagtccccaaggcggagaggcaacaaggccatattattgggggagcctttctttcgcatctcaggattattgctggcagaataatctttcacgaagagcttcaaggcggcgaggacggggtatttcgataagggcggagttgcacgatatgatcccatggccgcctcatgcgccctattgttacaatgaccctaaatacctctctgcctgatttacatgtggacaggacgcgtgggatgttacgttacattcaattaatatacaaatttggaggttgctctgtagccagatttactcaaatatgagggttgttccttggcgaatgctcccatacttcgaaagcgggggagccaggacattggagtatttcctagacatatttcatagagaccatgactgctttgaagttctcaactggtcatacattaggcttttttcgttggcagagatggtgcgcatggtggaaggtccatgcttctgcgggtatgcatggtgttgaagggaataggccggcgcctcccataaagctcgcattggtgggccgaaacatggtcgcatcgttcgcgggggcggacaaaccaggagctcgaaaataatctgtggcatgccttctcacacggaggactgcatgtttccacattagttgcctcagataatcgattcagacatagcgccagggctgggtccgccatttccttgcatggacgggggactcggtctttgcggagtagaggcctttgcagaccgtgagaagagctcgttgagtctggcatatagctcattcacagcgggaaggtttgggggcggtgtcataatcgctggcgtttgaggaacgacaccacccgctttctttgctcgatcggcgatagttgcgaggtaggctaggttggcttgtagacgtcgcatgcactcaatgtattcggggctcggcttctgattggctttggatgcatccggctgctctgacgcgggtgaatttgtatcggggttggaggcggggccagccttgccggccgcttgaaggttcaccacttcctgtaacaaggccgagttgatgtcaaggagggcagcgacacgggccttttcacgcgctgcaaattgagcttgagcttgggcctgagcctggtttggagccgcaggtaaggcagcggtttggggcgagttcatttgcgaagggggttttggttgtgtgccaagcaggttgttcgctgatatggaagccatgttttgggagaaggtctgcgctacttgagatggcatgtttgcgccggatgtgccttgaggggggacaaactggcccatggaggtagggatgggggtctgggcgtaggacgctgagaaattatccataggtgctgctattacgacaaagtatatggtcagttcaaagcattccaattagtgcgcaacagtagacaggagacaaatggtcaaagctagacagtgccaagtggtcaatgcattgatagcgatgggtgttaggggcgagtgacacaagcatgagggggggcttggaaataatccaatccgatcttgagcctcatgagacaccctcccttttccccaagaatttgagcaacatgtctgccgcgccggggtaaaagtgacagatacgccgtgccaatgataataatgaaaaaaggaaaaagaaaggggggcaacgaaccggaagattgttgggggaaaccagagggcatcatagctccaccaggaccaggctgcatgggcatagcaccaaactgttgagcagacggtgtctttgattgggggtattggggaacagcgttagggtaaaaaggcatctgttggttttgggggctctgagtcgggacgggatagcctgcgggataaccagtattggggtccattgtgtaatgagggaccatcacggttgaggagtggctccgggggattcttttcaccctgtaatacttcttctctccagcgatcccctcgatttagggaaactactgtggctgaattacgcaggccgcacggacgagacggtgaaggcccaacggcgcttgttgaaccgggaatccagggatgggggggatatttggcgagaccccgaagctgctagaaataaagaagagagtggtgattggctcagtcaaaaggcagggatgtattgggaacacggcctccacagcgaactggaactcggagcaagacagattttggtgcccagattcagagcgatcagccgtgggcgggctaatgcagcggagcccttttggaatggtggagacacaggctcgaatgaatgatgttgagctgataatagtaatatctccagttgacttgaaacttgaattcgtgattcagagttctaagagtgtacttgatgtttagagagagtcactggtgttccacaatgaaagtgacattggaaggtcacggggtacgatatggaccgccccaggcagcaaatttattctgcctgagatgtatggaaaccacatccgactgcctttttcatagttaataactatcaaggatagtcggcttgtgattcctctgtatttgacgatataagaattgaatggtcccaatatatattatactggtttgagatgatattagagacattatatagaatataatatcaactcggttttttcatgccgttttcctttctagccagatgaaaatctggcctaaacaaagtgcagaatacgagagggaaatacaacatatggccaaaagggtatacgtataaaatgattaagtatgacccgcgaaaaccgacctaccgacatccgcctaactatgccttcggtaacagactgcttcctcttctatgtcacttctctttgcccatagcgagtttcagtctctccctcatgtaccgagtagatagacgaccccgggaggatacctcttaccgccataatgcgtacacgtgagatcgacgcactttccctgctacctaggtacgtatcgtcggtctagactggcagcgcctcatatctacgtggcggtgctaggaataacgctattcacggataaaggccccccaatttccccggcaatgatgtcaaagggagcggaaataagagttcctaaacaaggttagtactttgtactccgtacaactaggcatgtatggatttgccagcgaccgcttggcaattatagactgacgatcagtatccacaaatcacattcggggactttgacacacggttcagatgtatgtgagaaaggggttggaaattcttcctaactcgatgtgtcaggaacgaccaagcgacacgtcaggtaatctcccaaaaaagggtaactatctagacgatcctatgaactttgtttctatcaatcactctgacgatctctaccgcaaaggcatgtaagtgcagcgtgtaggcgctgcaggggatagagaaaaccatttgttgaagtctgggtatgaaggaagacattgagaattttattaattggactctcgaacatacatagttgtgcatacgcagttacgaatatgcaaagggctaaaaggggaactgtggagaccactgtgaagcctgcgccacaagctccagtatcccatttccaggaaatgcaagtcggatatgccggtctatgcaaatgggaattatggggcggagcaattctggcagtttagctattcggagtcctccggtactaccccgaggtagctccagggctcttccaatgttccaaagccatggatatgagtccaaaccttaaactcaatctctttcccgacgataaaccttctttttattccgttccctcgacaggggattcccttggattcccttggattaccttggattaccttggactgatatggaatcccatggattgaagcggagtcaccggagttcttaggtggatgttctccgtcgtatggtattgatatcgagtgtccgagattaacaaatcaagtatgtatccatatgttgtggatgttcgctaaacgaggacttcgtcgaaagcaacacactcttccccacaacggaaagtccatgaatcgagaagcttatcgtgcgttcgatcatagaatttgtgctccacttgactgtcgagattcgatcgagcaaagtttacaactgttagataattaggtactttaaaaagatctattaatgaggccatctgcacctacggagtactccatacaatatacacctgggcacttacccaaattgacgtaccatgggaaatagcacggtggcaaattgtacctaggtaccatcgctgattccatattcggttcgcattcttccatcccctttcggccgaagcaagtcgtccatgaaaagtgtcagaacccgaagcttgttcaaagcaagcccggccgattgtattatacctatgacatatggagtcgatctgaggctgaggcttttcagactagaccgagctaatcccgttcggccggtaaaatactggtttccttatccggtaatttgattcaaaaattcggatttcccccaaccactctatgacgacaaagtgcataggaaccttggaaggttcttgtgcatgggggtcttggcaaactgactattttgtatctaggcatgttctagtgatagatagagaactataatggcacggggcatcaaatgctcaatccttccaaggttctaccgggtagctctgtgtcagttaacgtgtctttgataagtaaggagatggaaagagtaatacatatacaatttcgggaatatggtaataaggcaactggttggcataaggcccttgattattatcatgcaactgtttcttattgcacgttatggtacttttgtactcggtagttacttactataatatcaggttctaaggggcatggatgttctaactgagtgagagtttgggggaaacctaaccactcccatagccaatattggtaggcggttatatacgtatataatataataatagccaagcgctgaaatgtcaatgtcattcggggaaattattcaaattcccctgcggctttacactaagatcgtcatgggtccaaggaaaagatgtccgcattccaaatgtggacttaatactccgtctgtttcgatactgtatctgcatttgcagatcggtctttctctcgtctccacaggcctttgacctttccttctagttgcgtacggagtagggagggtgcgccacacctgggaaaaaaagacccagtggctttttataaatcgttatcaaagcacatttagtcactgatcgacaagagaggcattgctactgaccccatcgcagcatggtctttatctgggcttctaccccccaaatttcctgtagaaaaatccccacttcgtctgtttcgtaacttagacgagtctgccattcaaaacccggggccattggctccatttacagtgtattccatccttcttatgtgatgaccttgacagagctgaccctagggcccggaaaagatgtccaggcaatcaccagaggagcctggatatacccactttgctatgatctacatagacaacgatgggaatctttgccaaagggcctccgattccatttcagagagtcgcgaggccatcctctctcctcgggttacgggtgaattcctccgagcagtggcgatgtcgagagaagcccatgcaacacgatctcaaggtaagacctctatttctctatttaccccacatgaagtgttctcgttgacatgggacagtttctcccgagatccaagttccgtctagtggggggcaaccgtttaacaacagctctgccccgtcgcagggggagtccgtgggttacaatggaatggggctgggtagtcaacagaggatgcaggttccatctcaaccagagtccccgttccagccggcaatgtggccgtcatgcgaatcttggtctctacaagctagctcacaacccaaaaagaatttcggtggtcggaacctcaacctagcttcacaccaaagagcctctatctctgtaaaagatagaggacttttgcgtctctactacgaaaaaatcttccaaaatctacaacaaacaaactgccgaattatcgccaaagcctatatcaaattagtcgagccgcgcaagcaagtgaactacccctacaatggacggaagatcgttgaaggaagaacccaacagctggaccccgaggcaactaagccaccatggtggccactaggagtgagccatcgggaaccggatcatcttccaaaagttggtaagagagagaaatccttccgattgttcctaccaagctaacaataacctagaacgcattcgacttttggtatacatgctctgcgaaatgcgcgaaacccacggaatcaccaccgccagattaaaacaaagcgaccagcccattcgtcgtcaaatcctcccggtcgaacgtttgcaaatcttggatgaggcatatcaagttcgcgaggaggaagaaaaatacctagatgggatttcaggtacatactactcatgctatctcctccacaccctcccgaaactcacatgtgttatctagatggaaaacgcgtgtctatagctcgcacaaatctccctcaaatggccggagacacttccagcggacaaagctcgccaattgaaccaccctcttctcaaaatatcgtcgaatccgagtgcagcgacgggatctccgacatcgacataacccaagtcacctccgaagacctaccgaacgcgcccccttacaatccttcccacccttataacccaatgcacatgggtccaaacacccaataccattctgtcggcccctccaacatgtcaacatcaccgctggaactgaggccgaaacacgaaccagaatctgccgggacacatttgattgaccggacacatcccactggcatggcgcactatccataccctggtgtttccggcattcaaccaaccccgatggggttctacggtacctctgttccaatcacccagacttcgacagaaaacttgtctacggaggcaatgatgccatacggccacccctactatttcagttattgagcgtctagcatggaccggagtacatataatgacctttttttacgataatcaatttcgttcgcgtcacatctgaagaagataatatgccaattcattataaagtaatcccgaggctatgttctgatacgaaggcggatgggcagaggccggcctatttcccttcgtcatcgagcatcattgccccctcaagtctatagacactgcgagtaccagtcattgatgtgtttgcaggttccactggcgcaagttgtgcctccagtccagcccgagccaccacactgaccatagagcgggactctagtagcaccgccagaaccggcggtagtcgtgctagtaaccagagtagtagtagtggaggacgtaccgcccagagcagccaagataccagcataagcaggcttcttcacgaggttcttatcccaaggacacgcatcaccctgaccagggaatgtgctcggaacccacgagtatttatccgtgtagtcccaaatagtaatgccaacgcacttggtatttgccatgcacgccgcaacggtatttttatagtcggtggactgctgggtaagcaaggcagtagttgatggcagagtcatacggatgtcgagttcagtgtaggcaacgtcaactcccagggctgtgaatgcggctaggttggtagtctgcgcgctctgactaggggtacttccgacaataaagtgtgcctgcagtccgacaccgtcgatcttggcaccgtactgctgcaccagcttgacgattctctgggcacctgatgacttggaaccgggtgattcgatgttgtagtcgttgtagtagagcttggcgtctggatctgcggcggctgctgttgcaaacgcgatgggaaggaatgcctcgccgatgtatttgtagaagacactgtcacgataggtaccgtcctcgttaagagctagcaatgcatatattagctatttgatgatgatgatgatataattcgttcttgggttcagtactgaccctcattgacaacatcccaagcgtaacatttgcctttgtagtgagtgaccacgttggtgatgtggtttttcatggcagcaatcagagttgcgttggtccaggagccacttgagactatttaccaattagatagctactcatggattgaaagacatgctataacagagcttaccccagctgggcaattggctatgccaaaccagagtatggcaccgcagcttttggccattcttagcagcaaggttggcaatgacatctccattggtataggagaaggtgttttgggacggctcaagtgcatcccactagcgacaattagtgagggcatgaattacacggtaagggttatctaaccttctgcgaattgcccggtgtaatttggccgaagtcatctgtgttgctcagttgggtaaggtacggaacatcagtcaactcggggttatcagtggctgatccgaagtatagcttcccctttgcaacagcagaggtgtgcaagccggctccttgggtcctattgaagaaaaaagggcatcaatgactgttcatgctcgagattgaaagataaaccatacaactgaggaagggcactggccaacgccagggcaatggtagagaaatgaaccatgacgagataatcaatgtcagatatagaattgatcagaagttctagacctggaagggaaattgaggggatcaagctccttttatagtcagggataaacatggccagactgtcagggccctagtagttctgacatttgacagcttcaactttgacgggccgacaggccgtggcatagttgtcgcggcctttgcaaatggtcgaatgggcttggcctctgctaagacgcctaatcgtatgagctcgtgcatggaatttgtcactttagccagggaaatagacacagggcccggcaccacattgtggacaggatggagaaacgaatagagagacagcggaccaaattccgtattttcttcacggcaaaaagaggaaaagaggcgttttttatatttcccgtcgagtgaagttgaagaaagagaccgggtaaatgcgctcgtctccgcttccccggagaatcttcaggtctcattcaggctagacagcggtcccctcttttccattaaacagcgctgaccacttatgcagtcaaagtcaatcaaaactacaatctgagccaatcgattatattcacttggccttggatatgttgtattataatcaatgggacctttcgttcccaggggcattgccgcctcaatgatatctataagaatctgaaaatgcatctatgtacacaaggcgcttttaaggggtatcagagtttttgtatcatgttgttccgtgataggactagaatcgagcgtcaagagtggtcaggtaccactgttgtagccaaaccccaacagggtgacgggtaggaggatagcactcctcccatgggagtggtttctgtggacacaagttccattggaatccacgagatcggttgaaagttgagcggtgggcctcatattgatgagatactgctcagccagtcttccgagccttcatctccgcaatgtatttgccggtcttggaaagaggcacaacgtggatggtgacaagctcatccacaacctcgaccttaccaccagagagaatttgcaataaaggcagcttcttgccagccttgatcaaaccaccagagacagtctccatgaagcattcaacaccttcaacagtgtattccttcttggtgtcccaaggaagggggaagatgtaactcagatgatcctcgatagcgttcatctccgagaacgccttgataaagtccgactgggcgtccatggggtaaaggaaaacagtcgggaactcgattgtgctctccggtgagagaggatcaggcacaaggcgaatcttggcatcttccatatcaggaggctgagtggttttgcgggttctgatctgacgggcacgtagagctgtgctgaggaccatattctgcttgcgcaccttctcttcttccgccttcttcctcgcggcagcacgttccaaaagggccttccgctcggcaatctttctggcggattcttgaagagccttactctctgggtcgattgccaatcctcgggctgcagcgtcttcagcctcggcaaccttgtccaacttgaagagtgccaaggaggagcgatagaaggcctttacgtttttagggttgaacttaagggcaacagcacagtcgagagtacaagaacggtagtttcctgtagaggaaataggtcagataatgtccggtacagccgggaaggtaaggcatacctagttccaagttgcacaatgcccggttgatgtgcgatgcctcatccaatttgcgcaacagcgcggcctcttcttcggggtcttcgggcttctcccacttatcaaccttggcgttaatgacagcaatagcctttgtgtagaactctttagcgtcgatccacttgagctcctgcacagcttcattgccttgtcccttgaaggtgtttgcaacctcggccctagtaccttcgttttgcagagcctgaagagcatctagtagtacgttttcaccctcttgaaacagatatgtgtcagttgaatcgaacaggcatgtccaaggaataatccgacgtactctcgtcacccgcattttcaatatcggtcataaacagaggagtcttattcatcattgccatcaactcctctgaagtatgcgactgaacggccgcaatagctggcggaagctcgggtgcattggggtcggttttgcgcgccttcagtgcctcctcgttgatcgggaagggaatttcgtttgtaggagcgaaggcgtcaaacccaggctggggtaagccctgcgcgacctcagggggagccttgttgaggtcgagcgactcatcaaagtcatccggaagttcttcaacgcgcgacatcttgagggttctgtcacaggaaaatgtcttgttcggagatttggagatcgtccagacgcttagaaatgatgcccgcaatgcaaacagtgcaaacaagagggggtcagctcggccctaaaccctattaccggattggtcgaactgaaaatgagattaaaatgtttgggaagagcaatcaaaagagaacggacgattacgacaaaaacttgggttaaaaccatctagatattccctgatggactgtatgtttccatgtcgggtaagcgcatatggagatatggagagccggatggtgcctgaggccgcaacttttcataactatcattttgctagttaccaggttatattccactatctatggatatctgcctcactattgacatggttctgtcaaaattctcctataacaaggcatatacacactgttttatggaaaaacaactactctactagccaatgacaatactatatacgtatctagtaggcagtgccggacacctactatgcaggcctgaccttgtatactagatccccacaactgacagctcccagaaagctaaaatgcatgcctccttagccctgtgactgacctccgcacatcgggtgctatttcatcggcgaaagcccgaccaaaactaaaccccgcatccatcgggttgaagaccgagctccgatataggctgtatatagtcctgggcaccaaggtatgagaatgatctgatttagcccagataatcctttgtaacaacggagaccacaacaacatggccaaaaacttcaacattctcgtcctacccggcgatggcatcggccccgaggtcatggccgaagccgtgaaggtcctcaaagtctttgagacaccggaacgcaagttcgaactgcgccaggagcttattggaggatgcagcattgacgcttatggcaagtccgtgactgaagaagtcaaacaggcggctttggactcagacgcagtactcttcgccgcagttgggggaccgaaatgggacaatcaacgccgtggtcttgatggtcctgagggaggactactccaactacgaaaggctatggatatctatgcgaacctacgcccgtgctcttctacctcgccgagtgcttctattgccaaggagttcagcccgttcaagcacgatgttattgaaggtgttgattttgttgtcgtgcgggagaactgcggaggggcctattttggccgcaaggttgaagaggaaacatatggtgggttggactgagatcctattgtaattcaatagctattctaacctttcttctactacagcaatggatgaatggggttactccgaagccgagatccagcgtgttacccgtttatccgctgaagtggcactgcgacacaatcccccttggcctttgatctcactagacaaggcgaatgtactagcttcttctaggctatggcgccgggtagtggacaagaccatggcagccgagtacccgcaagtcaaattggtgcaccagctggcagactccgcgtcgttgattctagcaacgaacccacgatccctgaatggcgttatcctggctgacaatacctttggcgacatgatctccgaccaagctgggtccattgtgggtacgctaggtgtgttgccgagtgccagtctcaacggcctgcctggtgataagactctgaagacacggccctacgggctgtacgagcctacacatggatctgctccgacgtaagtgctagaaacatgatacgaaggtcttgttctaactttgttatagtattgcgggacaaaatattgccaacccagttgctatgatcctctgcgtcgcgcttatgttccgatactctttgggcatggaagatgaggcccgacgtgtggaggatgcggtgcgtaaagtgctggactcagggcttcggacgcctgacctcgggggtaaggctggaactaaagaagtgggagatgcgattgtgtctgcactgtagcgtatacaagacacatagcatatatgaatgattgcttggttcaaacaatatttcagcatacttagatatgcgttaacctgtctgatcaatgaacttcattctaacaaagacgggagctgatcaaaggcaatgtttgttcactgaatggggttgaaagaaaatctgattagatgagctcataacttcccaaagattataattacactggtatattcttagggacctttcattcttctttccaattcctctccatgtctaaaattctacatcctctcaagcccaaaggttctacaccccagagtcccctccaggacgggtctcctacgaaaacccgagcactcaccatgtcactccagaagcctaccatctcatctaaaccagtgatcgcaccgggtcacccaaaccagcaaccaaatacaccagggttctgtgctctacgcctcgaaaacctagaacaccaaacctccaccacaaaacgcgagctgatggcatccatcgcggcagacatctgtgctacattcataagcatcgcaaagtactccgaagaaggcatacttcaagcgcagcacaccgacgtaatcgacaaggtgatccagacgatccgcgacacggacgtgaagcagcgacacttgctcgacagacaagtgcgccgacttcgaaaagaaagaaagtggatccggaagaagtattcgcgattggctgggcaggcggatgggctcagtcgcgcatatcagacgaagatgcgaaagctgagcatctcgctacacgaggcgcgggaggaggtggcgcgtttacagagggagcgggatatgctgttaacttgcttgaagaaggatgttattgaggaggctgcttcgaatgataatgccgacggggaattcgaggtcgttgcggatgcggaggatgtcgatggggaatttgagattgaatagagcggagacgacaacgtggatgagcgagatccctgaaggctttcggacatctctcggatatctccaaggtgctccacagatgttggtattctttgagctttcatgtgaaaccattaattttctttgttggccctggctttgatggcaaaagaagatctgtcccatgtccattttgaggactggagttcaaacactgacggagtgaacagctgctcaagcatgttcactctggggtacagcctccttcatcaatctctcccagagggttggtcaatcctttagccacatgacaagcagcgcagaatcgagaagcaagttctgtcaaaaatgacactcatttcaactgtatgcccttgcaaatactatacatacctaggtatgtattaatatacgtaagcatcggatttgcccataaatgttgtccgaatcttaaagtcggcttctgagttccgaggtctgaatcggcatttgatggcgacatttggaatgtgatttcatatccagggcttccaaggttgtcccgatagttataaggcgataatctcttaaaataggagatatgcgccatcggaaccgagaaatccagtcggaaattgccagaaatcacagcagaaatcacagatcataagaaagtttgacggtcaagtccaacctcggcatcttcaataggcgcaggctgattcggcccgcggatccaccgacttctcttccatgtggaaagtccgggggttctctttttcgggttctcttttctgtccagttttctcttttcttttctctttctgatctcgttctgatcttcaattcatcatcttcgaactcatctcgaagccgatcttgagtttgttcagattctccccgaaaagcataccccggaccgcgttatcggccgagaccgacaatgagcactcacgactatgacgccgtccgcaaggacatcgccgctatcctgcagaagcccggttatgacgatggcagcgcaggacccgtattcgtgcgactagcatggtaagtaaatgtgatcctcgaagccttgttctccggtcggggaccctcggaccaacggggcgataagccttcctcaacgcaatatcactgacaatatctcaaacaggcactcgtctggcacgtacgacgccgaaactgacaccggtggttccaacggagccggcatgcggtacgaagcagagggtggcgatcccgccaacgcgggtctgcagcacggacgggcattcctggagccgattaaagagaagcacccctggatcacgtactcggatctgtggactctggccggcgtagttgcgatcaaggagatgggcggacccgatatcccctggcaaggcggacgcacagatctgataggcgacaccaaggtgccgccacggggacgactgccagacggagcccagggcgccgaccacctgcggttcatcttctatcgcatgggtttcaacgaccaggagatcgtcgcgctgacgggcggacacaacctgggccggtgccacggcgaccgcagtggattcgagggtccgtgggtgacgaacccgacgcggttctcgaactcgttcttcaaattgctgcttcagcttgactggaagcctcgcaaaatggcgtcgggtatgacgcagtttgtgtatgaggatcccgatgccgaggaggacgaggagccattaatgatgctgccgactgatatgtcgcttttgacggacccggcattttccccgtgggttaagcgatatgccgaggataaggagttgttcttcgatcacttctccaaggtgtttgccaaactgattgaacttggcatccggcgcgatgctcagggtgcagtgaccaacactgacggcaccctgggtgggtatgtttcggcaccgaagaagagcaacactgctacaggcccgcccagagcgcgtctgtagagtgtcatcttttttgtttgttttgtatttggcttgtttttggataaattccccactgcgttggtagatctgggactgtagactgcaggactcggacgtgtaaatagatcatagatcatagaatgtgtttaagagaactggatagctgttagtatgtagttttgtagttgataagttaaagtaatgggattataaagaggtaagagagggaaaaggaaagggggaagcctaagtctgggagtctggggtaggactgcggggaaggctagtgctaggtagtattcataatactacctgtatacatatacatgtatacagactgtctgtatggacggagtactccgtccatacatatgtgagcttgctatgtatgtatttaaggagtaattatcgttaacaagtacgattaactagtactaactaatactactagtactaaatacatatatgtatgtactatatacagactcgtgcctcgggtatatcaaataagagccccctgattggcagatggccgtgttaacttgttacctagcttgtatcaacggtgtatacatatgtacctaggtacctaggtacctggcgatattgaatttagaacaataacacacatgcgtataactaacatataacacataactaacatataatatctatataaaataataattgaatcacaaatctgcttcatctccactatcaccaggcttccacgtcggatcggtattcttcttcctcgaatttctcaatcccggccttcttgataccttccgcgtctcctcctctttcttcggttcttcctttcgttgttgtttatgactctcctctctcgtccattcttggtctttctccggccctttctccagtacttcactttcttgtttttcctgttctctctccttttcgagctctttctgtttttcccgctcctctctagtcttcttgtcgagctcctcttgtttcttctgctcctctctccttttccgctcgtgctcctgtttcttctgtctcctttgggtctctattctctctcgaacgaccttctcttggtcggctttctcctcttcctctccgtcttctatatcactaaatcttcgctttgccctgaatagacgcatattccctgcacgaagagccttcttctcacttgcagtcagggcctgcttagcaatagcatagtttgccatcgcagacctctggagtccaataccgtgcgtactgcggaagacccggtttcgaagcccagggatagtgccatttgcatctcgcatgggaatatctgaccatccagtgcccttgcgattccctaggtagggcgtcaaaggcagttcggggaagtccagagctccttcctcatcaggtatacctgaaggccacatatcgggagttggagccacccagcgtggactctgcatcatcgagtcgaacatagggttctgggtggaaccctcagttacgtcttgatcaatggccggctcttcatccatcattgttacgtcaaggagtgaggaaaagtcgaattccggaggtgtggtggtggagtagatcgattgatcaatgagcgatgggtcaaggaccgccggatcaaatagcgccggatcaaaaagcgccggatcaagaagcgccggatcaagaagcgccggatcaagaagcgccggatcaagaagcgccggatcaagaagcgccggatcaagaggcgctggatcgagaagcgacgggtcaagaagcgtcggaccagtaagcgccgggtcaatggtggcggcgggtgttagagtgggcgtggcagtctgtacagcggctattttgggggatggttgcgctgttgcccagccgggattgaaactgctgaagcgttcaccattgtatgaaagtatacgaggccatgactcctgctgcaacggaggagttgatcgcttccaagggatgtgtgcttcgaggacattcttgttctcttccacgcaagtgtttatctcgaacatcgcgttgttggcctttaacaggatgtctgtggaaggattcatgattcgctcatagaaaagaagtgggatagcatgatggttcacccattcagtgggtactctttcttcatgttggaatcctgggactccaccgataagaatcccggaattgacttggctgtcatacaccataagatttccatcgtctttctcgcctcgttgcgtatcagtccaaaaaaggcgagcatgagattcgttgttatagatgccaccaagccaacgatagtgtgcgacctgttgcttgtcttcatagtctatgtaattgaacctgagattctgcgtgtggtttcggattcgcgtcttgacatcagaggttaccaccagacgcagcgggagttgaccgatctttcgttctccagtgactcccgccgcgtcaccacacttgtcacatttgaaagattttcgtgggtagaaacatcgctcaatcaatacttgcagttctactccattttcatcgcccggttggtacccgggtaaaatgcaggacccttgatgggagttgtaaaacggaatctcgcgctgacatttgcaaggtgtcactcgctcaacgtggaaatagcgaaattgggcgaagcttctcgtggccactgaccataccgcccaaggaggaatcggttgtcccattttcaagccgggtgacccctccataaacatacggagccactcgtcacgcacaaatatagaagtcttatcatcgaaggtctcccagctggccatcgtcacttcgatgaatgctttttcaatatccttgaactcagatgctcgattgtttgcgcgatctatcttggtacaaccagcatcgagtagcattcctgctacaataacagcatccgtcgcacaagacattgcgttccagacagggccgcggccccggaccggaaacaaagtgccatttggatcccaatcaaacgtcaatggcgacaacttcacatttgccgtggtggggaatgatccaagtttcagcttgaggatatcttggtatgactgggcggacccgtcgcgaataggtttctcagtagatggaatggaggggtcacggtccaaatctgcatatacaatctgcatcacagctcgttctatggcatccgtaagcactcgcgtgtcaaccgggcctggggctttcgggtcaagggggcccaattggtgctttccaatgggggctactgtatgggaaggtgccagaccaggcgtccaggtgaaagttgtgatttcatcagcagcaaagacaggctcttgaaacggcggagtgggggaacgagggcgacctcggtaagcaggggcaccgggtgaaagttgtctcgagcgtttcctacggggttccctgttttcatctggagcccgtttctggccgggttcagggtccggtattctcgtacccggcggatcggtcaatgaataggctggtgtaaattgaactcctgggttcatgtgttgcaacagttccatacgaaggatttcctcttcttgcctagcgagtgttggcgccgggggtggaggaggaggaggtggtgtgtacaagctatcaactgagtacatatattgttggagaaggtggtcgggcatgtctgggggcgcgtccagagggcgtatgtacgcattcaagataggcgtggtcacatcaggaagggaagtgtaccacctactgagtggccttgggcgcggatctaggtcgtatctcaagagtcgtggcccagtatctcggttgatattgagcatttcaagccaagtcttcggacgatggcgttcttgcatgtagtagatgagcttgaacagaaacatctgctgaaccttgagattctgcttcttcctcgtcgtcttggcggtcttggtcgtttcctcatatttgattccccagaagtaatgtttcatcaacacttgcacctgcgggagcttcaatgaacgactatggcccagtgcaatactttcgaacttgacatcaaaatgtgaccagtcgttaggtggattaggaagccgggtcaaatcgtaaatagttgagggttgaggtgggtgttcgagttcctccggcctcgacgggaaatcggaaaggggaggaacctcgagtggagagaaggtactcatctcggcaaactgagagtgaaggaatcaaggcctatgaaaatatggcacactgggctcaatcaggagcaatatcctgttattggggtgtcctatattggtttgagtatcttggaaaccatgagggccgaaacggtgcgacacggtgcgaaccaagcgctttaatggacaacgacggacatccattgtccagtgtggcagcttgaatgccatatctaccagccgaaagaaacagagtgtcatattgtaggtggtaagcatgggttgaaagaatacaccgagtgccccgaatcgagaacccatggtaacatcttgttccttgatgaacaaagcatttggattcctggaaaggtttaaggccagggcagaatgagcgtggaaaattctatatttgtcacattagctcacggtctcttggtcgaggtcgaatccagaggatatcaaagaaccgagtaaaaatagaaaggcacttctgatatcaacaacggtggggctcgggggtgcctttaaactaaacaaagaacataaattactaaatcgaaggcagcatacattggggtttctcgattcggtgtatgtagagtatgttatgaccatgttgctatcttgtttggccgtgaatgaacctcaccccaagtctagaaacgaccatcaaagtgtggaagtggttagtatcgaggcagggatccctgagctatctcctaaagtgagtgaatcggggactttagcataatccggcccgaaagacatatgggcgaaagaatgtatgggcctgtgagtgccaatcgacttcgagacgcgatccaataatcattcaatcgcgaatgaaaaaagaaagataaagcaagactcaaagagatgacagtgccacagagcaaaccggtatatgtacccctgaaagatttactcgaagcacaaagagatattatgacagtggctgacatctccgagggactgggttcgtcaaagtttcatgtcgaggaaaacaaagcagggcttcacgtaagatacaggtaaataacagagcaaattaccagagtctaacggtgaaattaacagtcatgtgaccccacatgatctacattatagactagccattttgggtctagcccctgacaagcgagccctcgtccaaatcaggttagcgtcccaattacccgatcccacaagcaaagtcactcagttggacttcctctctccatccctctgtcgacaacccatcgcgatcctcgcccatcgcccatcatgtgtacgtgacgaccccttctttcaatctgagagcattatatgatatacaaccacgaatttgcccaagaaagaagaaaagcaggaagcggtggcacagaaaacggttctcgaaattgaatgttggctaacatggggatttctcgataacagcgctcgtgaccggcgagaagacgaacttccagttcatcttgcgtctgctcaacaccaatgttgacggcaagcagaagatcatgtacgcgctgacccagatcaagggtgtcggtcgccgttactccaacctggtctgcaagaaggccgatgtcgacctcaccaagcggtacgttcgccacaacccccatcgaatattcaagcattcccatccgtttgttattggaggaaaccttggaagagaaaattggggcagtttggatttgaatcgacacacggaatatcgcacaacaatcgcacaaatatcacaagaccagcgaagctgacaagacactttttacagtgctggtgagctcaccaccgaagagctcgagcgcatcgtgaccattctccagacccctacccagtacaagatcccctcgtggttcctcaacagacagcgcgacatcaccgatggtaaggacacccaggttgtctccaacggtctcgactccaagctccgtgaggatctcgagcgcctcaagaagatccgctcccaccgtggtctgcgtcactactggggcctccgtgtccgtggtcaacacaccaagaccactggtcgccgcggtcgcaccgtcggtgtcagcaagaagaagggctaaattattctgttcgtttttttgccgggggttcttggagggattccgttatttccggtgtgtttctatgggcactcgtgggaccttttccccgctgtcaaaaatttgaaaatgaaccatatcaatgaaatgatccgatctcttcgatacgtttactttgctcttggccgtgggcttgatggggtcttttgttctggatcaatgtgccaacttaatgatcctgtctcgatccttggtcctcgtagggtagaatatcttggcaaggctccgtggtatgctttggggtataccttgctgtggggtaggatgtcctagatcgtcggtgtggacaaggcttaagccatcaattatggggtacaccatctttttccttctaatgttagatacgctggactatcaacgcctatctgcgccgatttgcctatcagtgcctaccactacacaccggcactccatatcctgaatgtctacactacgcccgatatgtttccatcaagctcaacgaccttttaagcttcatggctgttgcttatttgatgtcaagtctatccaagattgattgaattcaaagttgcctagtcgtatatactaaacagaagccatatcaccaaaaaccagcaggaaacagatgatgccgagtatgcggcctttctgaatgtcccagaggattaggtgtcaaattgtacgcaaaacagccagtcacaagatcaataacacgcagtgtaatgataaattcatgaacccattgtatcatagagcaccccggtcgaccgtttagaaccattcaccaccgatccagcggttgaagaactccaggccagactcaggctggtccatgggaaccatgtggccaccgccgtagatacgcataaaggtgaagttgccgtgggacttgatctgaccgatcttcttgccaacatgctcgttctgtacaatcttgaggtcctcaagctcagcggaagcgaactccttctggccaggccactcaagagcctcggaccaggccttgttgccaagccagttgcagatgaagtcagcatcaccagcgtagatcaggacggggatctgttcgaggaggccgggcacgaggcggtggtaaggcttgaaccaatcgccattgaacaggaagttacggttgatgtcgaagttgcatgagtcgtagccatcaacctcagcaccgacagcctcgcgcacgctctcctggccaaggtactcgctgacgtagcccatgcccttgtagcacaggttgctctcgtcctcacacttgccgcgaatatcgtaaacgttctggccggtgcgctggtaggggccaagcatggcgttgttgcagtaaatcgaggccgggacgcaaacccaggggctctcgctgttgtagcaggcctggatcatgctttggcagcgggacagggagttgtccatggactggcaggtgctctcgtctagaacagcggggtaaccaccctcgccacaggccatagggcggtagtaaccgtactgagtgagaccgtcggtgagaccgttaccaatgagaacagacttgaggttgatgttgcgcttcttgtgggagagaatctccgaagccatgacagggatatagtggccagcgtatgactcgccagcaatgtggaagtcctgtgtagcgtactcagggaattgtttgaagaacaatgtcaggagagcatagacgtccttgccagcagcaacagtgtcactgacggagccgccgctgtaggagtagccgacattgatgggctggtccaggaagatcacagaggcattgttgttccacgagaaatcattgtagacaggcttaatcttagaatcgatggagctgggtccaagttccatgaaaagtccggtgagggacgagcagccgggaccgccattgagccaaaggaccacgggatcgttcttggggtcattgcgagactcgaagaaccctttctgatgttaggtaaactctagataataaacggacgtttcaaactcacaataaaacaggtgcttgtcgttctcatcatcgtctaggtaaccactgtactgcttcacaccgggatcgatgccgagagcgctgggatcaaccttcttggcgcggaggttgtaggcttccagcctgccatcaacctcacgctccttcgtgccctcagcaccagagacccaaatgtcttggacttcggcgccactgacatgataatcccagtgcgagtcagggcggcgggtgtgcttcttgggcagggaaagcaagggagcgctctccatggattccgggaagtagttagagacttcttcccagagctgacgagcctctccagaaagggacttgaactggtcctggaggtgctgcaggggcttgaatgcatccgcaccctgctggattacgttctccgcatactccttgtgagctccgaggacttgctggaagggtggggcagcggccgaagcagctcccgccaagagagtggcagacaggactctcattgcgaactgtttttgaattcaacagcaacaatgatgctaatgatgagttggtgatgagccgcgggtaccttgggatctggagtcaggcacctcttatcagtaaccgtttgtgggaatggctctcgaaaacaagccaaagaaatatactctcttacactgtgaaaataccacaagatatttgataattgtaataaatctgaggattcaaagaggcaagacggtgatgtcttgtgcttgtgagatgaggagaagcaggtcccttggccgatgacgccggggacggtcgataagacgagacggctggaccaatcaagtgaccccaaggtgggtcggccccatgatcggatgattcagcatgagtcacgggattccacctggaaggctacgaggggcagcttgtggactaagcccttttgggtagatttccttgacgcaaatcaacttttgatactccgtactcaagtctacatatatccttcaatcttgacagtgtcgtctatttggaaatagtattcaaaaatatatcttgaatatcactgcattttctggtgtctgctttttttcttactgaagcaacagccctcagcggcttcacacacccaaaatgcctatcaaccaaccctccaaccagatcaagttcaccaacgtgtcggttgtccgactaaagaagggtacgttcccgtcttacatatgtggctttagctttttctaaccttttatcacaaaccaggcaagaagcgctttgaactcgcctgttacaaaaacaaactgctcgaataccgatccggcgctgaaaaagatctcgacaatgtcctccaagtcccaaccgtcttcctctccgtctccaaagcacaaactgctccgtcagcagagctagcaaaagccttcggaaccggtacccctcgggaggaaatcctgcaagagatcctccgtaaaggtgaagtgcaagtcggcgagcgtgagcgcaaagatatcctcgagcgagtggagaaggaagtactggatatcgtgtcaggccgactagtcgacccctctaccaagcgcgtgtacacatcgggaatgatccacaaggcgttggatcaactatcctcagccagcggacaacaacagacacaagccagcggggaggcaaatggagatggcgaagagaaaccctctcagccgaagaagccgctctggacgggagtttcggcaaaccgctcggcgaagagtcaagcgttggatgccatgaaggctctcatcgcttggcagccgattcccgttatgcgggctcgcatgcgtcttcgtgtgacatgcccagtgtccctgctcaagcaatctgtcaaggctgctccaggtgctgggtcgaacaaggagaaggaagccccatctggaggctcaaagaacaacaagaaggggaataagggatcgaagaagtctgctaagagggacgattcagacatcgagggtggtcagtccgatgtggaagctacgcccaaggctccaagcaccgtcaaagacaaaatcatggcctttattgagtccgttgaatcgcaagaagttgttggtggggatgaatgggaggttgttggttttgctgagcccggtgcattcaagggattgaatgaactggtgagcaatgagacccgcggaagaggccgggttgaggttctggacatgtcgatcacacacgaggattgaataatgatgtttgatttctctatgggctttactgtacatgatataccgatacgactgatgacgaaaagtaaaaaagaaccttaaaaccttggaatacatttgatttcgacatgcaatctcattctgtctcattaatctcattaagggcaacgaataccctacgaaatagaggtgaagaaagtctattctcatggaaaaagcaaagatgaacgacagccaaacaacaaagacaaactgcagggaaaacacacaatggcatcatcagctcgtaaagaaaaagccactcaacatggaagagcgtatttgcaagaaaacaagaaaataaggatctcaagtataatagcgtttgggcgtatcattgactcgcaagaaagcagctaaaaatatgatacagactatgtaggatatagacaaatgaaagcaagaagccaaacgccgtgaataagagagaattgactatccccagagaaaagcgaaaagcagaaaagcaaccagggatcatcatacctggtttttttgtgaccctcgagtaattcagacgtccaacccacgtacgctgatattatcacacccagtcaccatcagaaccacattcttaccagggccgagttctctagcgagatcaagtgccttggataccgcgtgactcgagtcaagaccgggcaagatcccctcatgttgctgaagggttctaaatccgtccagggcaaccgcgtcggtagccgtggaaatttcaattcggccagagtccttccaatgggcgacttcaggacccacagtagacaagttcatatctggtgaaatggaatgcgagtcaaggatctggccatcgtggttttggagcaggagagtgcgggcaccctgcagtaccccaagtccaccatctgtcagggcagctgcattcgcagcttccacaccaaccaaccggatagatgagtcatgaaggaacggtctgaagagaccaattgcaccgctaccgctgccaacggcggtgacgagggcatccggctggcgacctgctgcctcgtgcatttgggctgcaacctcctcgcctagaagggattggaacgtgcgagccagggtcggcaggggactgggacccaccgggctacccatgaggtagtatgcagattcgtgattgcagaccgcatatcgcaaggcttctgtgatggcagcgcgtagaccacccatgccggagggtgcgcgggctgtcaggaccttagcgccgagggacttcatctcgagcacgtccttctcctgggcgctagcgtcatctgcaccaatgactaccacacagcgcaatcccagacgtgcgcacattgcagcggtgaccttgccatgtttggccgaggcgcaatccgtgacgatctcagaacggcccatacgacgagctagcaggagctggccggtgatgttgcgggtcttgtggctgccatattcattcttgtcctctcgcttcagccatatggtagccccacctgccaggctggttaattttccagccatgtgcagtggcgtgacacggtcacgctggaacgtggcatattcttcccagaacgaagggtctgaaacggtggcctcgaagaatgatgtcagctcgtataggaagcccattatggattctggagcgaaccggcccccataggagccatagccatcgaatgtgacctgcggggcccgcagactgccatctgcctgcaggatgggggtatacggtgtgattgtggtcagtctcgacgtggaggcagacttggcaggtgtctcggggggcgtggaagtgttgccagtgccggttgatactgttgttgccctggtttcgccatctgaggcatttgtcaattcggtctgtgtgctgctgtcacagctggagggagaaactgagggagtcctggactgtacgctgccaagcccctccaggcagggactagcaactcgggcttgagcaaccgttctgccagcaggtctcaagcgaatgggatcctccacgttttccgtgccatgtgtcgcagaatcagtgggttcgcatgatttggaagaggaaaagcaaagaaaacggcgcagagagcgaagacggtgcagagaacgaagcatgatgtatgatgtgttctatccttcggatgaaagtagaagttgaattgatgtcttggtaaagtgattgacaaacaaaccataaagagccatgaaaatcaaagagaatggatttgaggtttggctattcagaccatgtagaagtagggtacagtaccagttcacgagcgggcgagaggtgcattatgtacagtgtgggcgctcctgccttaggtacgtgggtatgtcacctttcagctcatcgggctagttcgacggagagctcgatcaatcggattgccttccttggctaactaggttccaagactatctgactacctaggtagttcttctagcccccttcgcgagtggagtatgtacatttggacttgtaagaacactgtatcgtggcgttacatagtagaacggtgaaggaggatgaccaagttcgaagtatacacatcgtcgtgtaaatatcattgagtctattcttacctagagactatatacaacatagtgataggtaagattcgcttcacttctagaacgtaaaagactcctcatactggtagaaaaaggatcatcattcagactcccaaggttgcccgacaccttgccaataaggatcaagttagaatacaccatacacaccgagtagttcattccaaataaatgcaatccttctagatgcaatgaaccgctgcggtggggagtgggactcgagccccagtgccaatgatgttctaagcccaatctagtatgatcagattccacatcgcaatcggggcgtgcaacttcgcaggaatccatctcattttagcactagagccgatgatcttgactatcaatgaaatcctacggaattccaaggttgttggcctcctaaggcagaatcccatatatgccgtgttacagcatgcgcactctcagaatagtcttgttccacaaagcgagtcttatcttaggccaaatccaaatccaaatccaaatccaaatccaaatccaaatccaaatccaaatccaaatccacggcgtgattcattccagaacccgctccacgtgttcccgtttcggggtacgttcagatgactcggctgatataatgatcgtcactttagctcaaaaatgagacatatcacattatatggatggagcacatggtataattttaccgatcaattttcctctcccaatcgatgagatccgtctgccctaaaccggccctttgggtcgtgttcatgcaaggatctctttcagccacatctttcattcaacgacacgttcttttacatctttttcaacgccaaattttacctttttgccttttcagcttgtacttttgaaattgttgggaaaattgctagctcccaatgaaaggaaaaaagaaaacaaagaaagaactgcaacccatcagcgagcagctttatcgttggcatattacatctttcattctttgtcacctcactatcataacacgttgggcatagcccatcccagaacgtatatatgatttaccaagctaataatatccttgcattctcttatagtctatacggaggagtgttcatatgtattttattaagatcgagctagggcgaggggtgatcatgtgataaacttaataggaaaaccttggaaacttcaaccaatgggaactcggccgaacagtcaaaggaatattattttgcctttctttgaatgtgttacgaattcctagcgagtaattgaaactagtaaagcatataccagccaaatttgaggttgtagaatttgtgtggtcgaaaatgggaggatacgaatatatattactgggctacttcgaacgactacttctgatacaaactcgaatttcgcaattatccatcgaatagcatgatatattaatccaagtagtatcaccgggcaccagaagacaccacaacagtctatcttataaataaatcattaaatcatcgtggaattcaaccgtaggaaagggaggtacactaggaatatcctatcggcttcgagggaacggggcgggggcggggtggggcgctcggcgtacgggggattttatccattaggggattagaccattctatagttagcatttgatctaaagtaagtaaattgatctggtctcaattcaatagggagaaggtagttaaaggaagaattcaggattgagctcaggcatcataacataggttgaaaatataggactaaattaaattaggaagaaagtctgcggatctcttggccgctagtttaggggtggaatctttatataccttgaaaccacggactatcatagctttaaaggcttggtatgaacagtttagagtgggaaaacacttagacacgcattcaaacacttaagcaacgtcatataggctagctttggtctgtagaccctatggtctctcagatagttctcgcatcttcctgtataattctcaaaattgctaggcctaccaggcctcccactttggatccatcctaccgcggagaagatcagctgtcatatagcccactttagccagctcctttgtcttgccaaaataatttttcgaacgaatcttatcattgtcatccacatacatgagcccatagagtggacccttggctttttttacttattgcgcttcagctagaaggaattatatgaatccggtggaatggttgccataaagaaccttatctcacccatggacctttccaagatttactggatacaaggtaatgtaatctgggaaactcaagctatgtagatagtgttgaagaatagagcgaacaagttacttctgccatgcaacgacctctaaacgtcatataaaactggtctttgtggctctagatttgagaacttgccccggattattgatgtttttgatgcatgatgtccttgataagttgaactcctccctatggatttacataacagtagaagccaattagccaatctggaaacattgtccgtgtctgctttcagcgccggtagacgtcgtgaacgggtcgccccgcccacgggttacccagactttgaccacccgcctctatagggcgaagaataagtatctattggctttcgtacttgcttagccttattttagtgcgtatttacttagggtgcaaggtataagcccgagtttttctttgtaaagctagggcacaggattgatctacgccacacactacacgccttcaaggatatgcggcaacagtgtaatggcgttgtcaagttcattctccgtgttgcagtaagcgagggggaagagaatgataatgtattctgacggccgagccgccagcttagttagacactccggcccatattagccgcaaggatattttgattgtcgggaatccggatagcattacaagcgcaactagttggcgatgcggaccatgtatgtaatatgactacctgttgcccagatcaacatcaaaccgatatcaagacaacctcgcaaaatatatccaaccgtaacgcgacaagcgtcatcccatttggtatttttactgataaaccaggtgatctcacgaatcattaccggaatagagcgatgtgcgatcttagcgcggggaaagaaagcttggccttcggcggggttaggagattcttcgagaacatctggaagacttgggatctagagcgatctatatagatcggccgttagacctttccaagatttagatttaatgattttaagcttatagttcaggtgaaagccggaaatttatctctagcaacgttatattgttatatttttttctttaaaccatctaagagacattcgcgacgtgtatatcgtgataagagcaatggctcacgaagccaggggtggatgggttaaaaccatcaaagcaaaatgaaccaacagaccccgccccccaaaaaatttaaaattaaaacagcaaaatccttaacgggtatacgcttagatgcaaatgcataacagatgtgagggaaagacgatcgctgaccggaagtccttggcatctagcgaggagcgactcggcaagcgagaagagtgaaacagcgtgccagtatggcgtttcagggatagcggacatcagtactcaaaatggtatcgagagaatgatgtccgaccgtggtccgaagggatccaaaaggcagccaaaaaaaagggttaaataaataaaagacatcgagtcgtgaggaatggaagggatgattcaaaagaggaacacatcacttggatgtcaagaaagtaggcgataagggatggatcaatcaggcgcagacctggacggcgatcaaggcgcgggtgaggtcctcgggggcgaaagggaggtcctttcgggcggacatgacgcacggggtcatggcgggcgagatggcgtggacgaggggtgacgagtagcgaatagactccttgaggaagaacttggggtcctttgaatcctcggggatctcgtagaaagagccctcgtttatgagggtcatcattgagccattgtagctggaagggttgacgatggtggaggactgcgagccagagtcggcggctcgtggggatgattcagcaggggcctcagggctggaggaggctatcgaaagaattgaggttagaatatatttttccttgatagggttgaatgtttcaattagggctgggtatgcgtacctggatcgacatcggctccatcatccggagacaccgagttgtcagtatcggatggaccggagtaatcgtcggaacctttataagtgtcgcagggcgacagggatatttcaagtgaacgagtccgttcgaccatcgcaccctggaaggaccaagcggctaggcttttttggtgttcacgatcgaagggaccccgaaatttcgaagggggacactcgtgtcgcctgtaatattcgatcttgggctttccatcatttttggatttggagcggaacacccgcttgaccttctcgcggaacgtcatattgggaaatagaaaagaacagtgaactgggatattcaagattcaaattcaagaagttcagagatcaatgcgggcggttcctggagaaaatgcctcagtggtgcataccacccccggattgggaacggacgcggtgggtgtgcaagcacgaatagcgggggttttggatcaggaacagtgtaatcatttcatgaggatatagaggagggaaaaaaagtacaagagaacagaaggaagtaaaagagggaaatgcgggaattatgtacaactagtattatgggactctggatgcaacggcaatagataagcaagtgggatggatgtccgggttccccagaagcgtctccggtccatatccggtgaggatattggggcaaaagcaacggcaatagcggcctctaacgaatccactgtctgtgcgagaagacattagcattatcctattaactattcgctttatattacttcaatattaagaactggtcactagaagatatatactagtcttaacatattgtagagtcaatcttgtactacaacataactacttcgtatactcttagaagtgaaattaatttccgagcaagtaacccgagaaccggccgagtctgggccaaggaattgtaatgtcactgttactattgcacttaggctatataggactgacattatagtggtagcaaacaggatcctccagattctccatatgttcaggtggtatgtcacgaatcaagcataataaaaaatatgatcatccatcgagatgtcagtggcgtccatacctagtactgcagcgaaggcttccagaaaactcggccagatgagagcctcactgttacatcatattatcttgtaagaggatgtgtcatgaaatggcagaagtacgcattggacgggaataaaccggaatcggagtggaacttggcttgcccaattgccccgcttgcccccactcggcacgtttttgccgcgtttgcctgcctatgacgtaggtttggctggtagggcgttttttttggccaaactatatatatcaggccggctggcccaatggcaaggcgcttgacttcgaatcaagagattgcaggttcgatccctgcgtcggtcacattctttttccacatgcttgtagtacaatcatatgtattctttttgcgcgagtgttctcatttagagcgcgtaaaaattattagtggcagcccggaggttccgcctaataagtgcagtctcgctacgtgaaacgttataacaggccggctggcccaatggcaaggcgcttgactacgaatcaagagattgcaggttcgatccctgcgtcggtcacttcttttttatatatcctacataattttcgctgcatacaacatatttatgcctgacccaaactgctttgtagtacgtagacaaagtacatctagtggggtttggaggctttcaaagccatggaccttgcattttgctcattttcaattttttactatttttatgattactattttcgtcttttgttattcttccaagaataacaaaagatgatgtaatcgctattttgccctggaccctttctccacgaagaatgtccacctgggtagtttctgaataacttaggagtaatgggatacatactgcgttagactttgcgcctttccccagatcatccttgaggtccctgccctgagtacccctggacggtccctacctagttgcgcaggcacaaccctatttacccgatgcagacgttagggctggcccatgctcacacgaccaactatgaaagacatcgcatgcggaggaatgtagagtaacaaaagggaaaagacatgtatagcgaattcaattcttttagaatagaaaatggaatgcatttgaatctaataataactaaacaactaaataactaaaataagaaaagtagaaaaaaaaaaagagattaaatttgtgatactttgtgttccagaactgtcctcaccacggatccaagaaccctagagaagagaacataccgcgtcatcccttacttgacttcttccttcctacacttcactactatagtaagttaacttcgctttttactatatttcatcttctgaccagcgcagaatcaattcaatcatgggtaagaaaggtggaaagaagaacaagaagggcagcaagcccgtcgccgctgctgtagagactgtcaaggacgtggtgtaagttggaaaagtccaattatgccacatcaccatctaactctttagtgaacccggtcaaaccgaggagcagatcaagcagaccgaaggtcagactgagaccgccgagcaaaccgtcacgcccgagactgcgacacagcctaccgagaccgtcgccgagcccatcaccgagcccgtcaaggcgcctgaggccacccccgagaccgaagcccccgcaactgtgatcccagctgtggcggagaccaaggatgtggagaccaaagaggctatgaaggccgagaaggctcttgcgacagagggtacagtggatgaggctgtggagaaagcgcgggcctccaaggctggccagctgggcgagttggaagatggcgccgccgcaggcactggtatgacacgtgttagtaaaaatgcgacaaagatggaactaacctggaaacctgcagctatcctcccggagtcgaccccgaaggagcccgcttccttggccaccacggccggtgttcctgcgacactggccgagcgccccaagacctcggaatcaactgccccggctgtcgatgcgcccgcgcctattgccgcccccgtcgagagcgatgccgcgcaccccaagcgcccgtacgagaagcccatcttcaacactgaggagaacttgaagccccacaagatgcccaagaccgacgaggaggcgctcccggctagcttgccggaggagaagaagaccgtcgataccctggccggtgctggacccgcttccactgcggcgctcacgacccctgagcctgttcctgtccaggatgaggcatccaaggttgccgagacacctaaggtcgaggagagggtcgctgaggctcccaagatcaccgaggagaaggtcgaggcacctaaggaggttgctgagacacccaaggttgccgaggagaagaagatcaccgaggcacctaaggtcgctgaggagaagatccctgccgagtctgtccccaagactaccgctgctcagtctggcgccggcaagcctacctcctctcccgaagcggtcgccgccgcgaacgctgccattctctcttccaagggcgataaggctgctgccccagctgctgctccggctgctgctccggctgccgccccggttgtttccaaggaggctgagcccaagaagcccgaagctgccctgaagcgtggcgaggagcccatgcctaagactgagacacccaagcctgagaccaaggctgagcctgtcaaggaggaggccggtaaggcccagcaagagactcagaagacatctgaggtagccgagcaggtcgagaagaagaagggcgggttcctgtcctggttgaagcgcaagttcaaataagtaattaattactgtggggagtgagagagccggtgtatgatatgtgttgtacgctaggtggggatgtggatgctggggggcttgcaggctagccccggctgcctcaggctttgtttttctttcctttgtcaggctttgatgatacaccaattgaaattatatatcagaatcagaatcagaatcatagtgcttattatttgtgtcctagggccttgtaacgtaaagtaattgttctaagtggacgacttcaaagtgttgggctccagggctcccaagttgtctgatgtacaccgctagtcaggtgtcaatgcgtagccccagatgaacatcgtatggagcttcaatgactctcttccccgacgaatcaggattctctctattctagtatcatcgtaatccactcagatcgtcattagtgaggtgatagctccagtggagacacaatatcaccaacatggcaccccgtagagcacagcacggctatcaggccgatgctgaaaaggttctgattctgctctatacagtcgtcaacgttggaactttacctaggtagtgccgttaggtgtaacaaacttacctttatctagaacaattgatcactcgggttttgccgacctcgagcaattcgaagattcccagtccttctccttaggaacagaaatattggtgaatagtatcgatacgacatttcagcggacggatatcgatcttgtgggtcattcgagacttcgatggctataacaacatttgaggctgcgttaattctcgcgcagactcctatggagatatcgtaacttacaggcaagaagagaggtgaaagtgattttgctgtaccttctttggtgcgtttgttcccatacacccaggtatattaggatttgcagagcccgaatatgaaccctggttctccatgtgtttccatggagacagagttttatgaggaagaggaagaggaaaaggaggaaagaggaaagaacgttggaaaggaatagggaaggtgagcttgatagggaaggggaaggcgcgtaagaaggaaggcacaacccagccctaccacatgatattttactggatgcagctgcctctctcctaaagttgattgcctgagttcttttacttcgtcttcttactcgacgtttccactattcgactctatgctaaggtatcagtgctgcctttcattggaaaaataacatggacgttgagcctttggaaagcgaactcacgtatccagggatcactatatactgatttcatacctcatccttcgcggtttaagttggcattaacatatattcccatctggtcctcctcagacgccttatgaatgatgccgatacatcagctggtgtcaatactatgcgggtttatggacattcccgtgatcctgggatgactgaccaaacatggaacttgtggtaagtgatcatccagatgcctatgttgttagttatgttaccttatgagctatatacgtactgatatacgtggttgactggcagctcatacggtctatttcactacctatttctcttgggttcttaatttcttgatctttacatcctgaccataaaatataactctctcgccctagtcgatacctaggaaagatgctaccattcaactcagaatataatccatgttagggagtccatgaagcaaggagatgaaaacacctggcttagtggcggcctgattctccgtttctcgagcggttgttcccatgcctcttcttggaaagactcaagtggtaaacgatataatgagaataagatgtgtggatgtccaatatgtacatatgtacagaatcggtctagccacatctccaagcggggttcccccgggcccgcaggccacccgcttacagctgtttcgggcctcggtaacattccaagaagtgtataaatctggggaaactctacatttctcaaatactactattcagttcttcaagatgacatctcttccgcgtaaactatggcagcatccagcccccgagtcgacccagatgggtcgcttccagcgagacctagagaaatccaccggacacaagttcgacgtgagtgagattggtctgtggaaagatactatctatctaacatctcccagtccttccatgatatgtacctgtattcagtcaagaaccgctcagcgttctgggaattctgctggaaatacttccaactgatccacgagggctcctacacaaaggtagttgatgaaaccgctcgaatggatagcgtgcccgaatggttccccggtgtacgtctgaacttcgccgagaacctgcttttctcacgcattgctggcgacaaaacagacaaggaagacgacaagattgctgttagcgaagttcgagaaggcgctgcgcatgaggttatccatctcacttggggtgagctccgacgacggactggagcgttggtccaggctatgaaggcccatggggtcgttcagggtgatcgtattgctctctgcgcggcgaatagcatcgatacactatttgtgttcttggcgtcaacggctctgggtgctatcttctcatctagttccacggatatgggtactaaaggcgttttggatagactgcttcagatcaagcctcgctggctgtttatggacgacctggcggtttataatggtaagaccatcgacttgcgatcgaagattggggaaatcgtgaaaggcatggagtctgtccctgaatttgagggagtcgtctcactacctcggttccattcgcggccggcggatatcaactccatctctaggaccaagactctggcggagttcctcgaaaaggcgggcggaaatgagaaacttgaatttgaaagagttggatttcgcgatcccttcttggtggtttactcgtctggcacgacaggacagccgaagtgtatcgtccattctgtgggcggcgtgcttctaaactcgagcaaggagggaagattgcatagtgatctcgggcctgactgtgtgaccttacaatatacgacaaccggatggattatgtatatgagtgctgtgcagactttactctttggggcacgggtggtgctgtatgatggaagcccatttatcccaggtatcactgctttggttgaccttgcagcacaggagaagtaagtcgtccttctgttgacatgacattcactccacgatgtacatttgaagtccccggctaatcaatggcagggtgacccaccttggaatatcaccccggtggctccatgagttacaacaggctaagatcaaaccccgcgagaaagttgatctcagctcgttacgggttgtcacgagcactggcatggtccttcgggatgcattgttcgagtggttctatgacgaagggttcccaccccatactcgtctgaataatatttctggtggcactgatattgcaggatcctttggaacaggcaacccccttgtcccactatatgttggtgggtgcgccggatgcagcctgggcattcccgtggaggtttacgactctacgattgagggcggcgacgggatcaagggagtacccgtggaggacggtgttccaggcgaattggtcgccacatctgcttttcccaacatgcccacactattctggggggatgagagcggcaagaagtaccatgatgcgtattttgagagattcgacagtgaggccactcccccctgtgcctatgactatggtcgctaattctcttcagacgtgtggacacacggcgacttcgtttccatccgtccaatcacgaaacaaattgtgtttcacggacgcgctgatggggtgctcaacccgtcgggagtgcgatttggatcggccgagatctatcgggtacttgagggccaattttcgaaagagattagcgattccatatgcgtaggccagcgacgaccaacagatacggacgagcgggtgatactctttttgctgatgaggccagggatggcgttcacaccggacctggttgcacgagtgaagagcgccatccgttcagagctgagccctcgccatgtacccatgttcacgtttgagacccatgaaatcccggtatgtgcttttgtagtgaaaaacaagatctgtaagagcggaactgacccacgtatatcgtcatagaccacggtcaacctgaaaaaggtggagctccctgtgaagcagattgtgtctggaaaaatcattaagccgtcgggtacactgctcaacccgaagagcttggacttctactatcaattcgccaaagtggaaactctgcgcgagagtaagctctgaacggactcttggacatcttcccatcccaagtgactccataagagaggggcagaccgggtccatcgggatcgtcacttcgctctgccaagctttgaccaagctttagcaacaccgggatctcttttgggggagttttgtatataagaatacatggtagaagataggaagtagattgaaatagaaatattgaacaacgcatatgaaaggaatagtaagtagaaaaggtagaagaagcagaaggaaaagtgatgggctgattgaagtaccccaggtggttcggtgtgtcttctgcgtcatcaaagcaccgcgcacgtccacctgggcgtatttatcgtttccgtgcttcttcccctctcctcttccctcaattcctttaattccttcaattgctgtttatttgctttttgagcttttctcttttgcatttcgcaattatggtccatctcgctaaagttaagaaggacaatgaggtcccaccctctactcatgacattgtctccgttgctcctccggacatagatgatttcgaaaccaatgtctacggcagtcactttgccgctgatcatatgcctctgcatgaaatgccagagcgagagatgcctcgccagattgcagctcgtatgatcaaggatgagctgagtctggacggtaatcccaagctcaacctcgctagtttcgtcaccacctacatggaagacgagatcgaacagataatgaccgaatctttcagcaagaactttattgattacgaggaatatccccactccgccgagatccagaaccgatgcgtgaatatgattgctagactctttcatattcccactgatgcctccggtgagaatgccatgggtacttcaaccattgggtcttccgaggctattatgctgggaacactggctatgaagaagcgatggcagaacaagcgcaaggctgagggcaaggactactcgcgtcccaacatcatcatgaacagtgctgtccaggtctgctgggaaaaggctgctcgttacttcgagatcgaggagaagtacgtctactgcaccgacactcgcttcgtgatcgaccctaaacaggcagtcgatttggtggacgagaacacaatcggtatctgcgctatcttgggtaccacctacaccggcgaatacgaggatatcaaggcgatcaacgatctactagtggagcgtaatatcgactgcccaatccacgttgatgcagctagtggtggctttgtcgctccattcatccagcctgatcttaagtgggacttccgcctggaaaaggtggtttccatcaacgtctctggtcacaagtatggtctggtctatcccggtgtcggatgggtcatctggcgctctccggagtatctaccccaggaattggtgttcaacatcaactatctaggggctgaccaggccagctttactttgaacttctccaagggcgcttctcatgttattgggcagtactaccagctgatccgcctgggcaaacacggttaccgcgcaattatgtccaacattactcgcataagcgactacatgtcttcagagtttgaaaagatgggcatggtcatattgagccagacacagggtcggggcctgccgctggtggcctggcgcctgcccacagacgacagccgtatctacgatgaatttgctgtggcccaccagctacgcgagcggggctggattgtaccagcgtacactatggcgcccaacagcgagaagctgcagatgatgcgcattgtcatccgcgaagatttcagcatgcacagatgcgacagcttgctccaggacttcaaacttgctatcgagtctttggatgctatggacaaatccatgcttgacaagtacaagacgtaagtttcttctgccctagatgtttctatttccatactgacatgtccacaggcatatgaagaaccaccgcaaccaccctcgacaccagtcgcgtgttcacgctcactacatgaacgagaaacactcgttgcaaggacagactggcaagacacatggagtgtgttagtttcgtacgttgttcaacatcctattgctcatcttcagaacatgctatgcaaagggagggtcggatggagtatctaggaggatgagttacagtgccgcacgcagacttggagccctggagagtatcttgtgacaggatccaactcattcggttgatatttagtagcatatggaccatggaaatgaaatgagtaaatcaataagcctggcaaactaacaagcgctgatttgcgcaagatagccttcagccagagatggttctcctataacaggtaaccagcttttgctattgaacacattatcgattatgatgtcatgtatacgaagacttacctaggtatataagagtagtcaaacacccctctaaagctgcagtgctttctttcctacaatttatctcctcacatgatcatttaccatggagcgtatttcaattgacctgagggggaataatcccccaacccgagaccttccaccgtcgacttctaccccggctcaccttccaccagccaaggcgatgaaacttcatccatccaaaccaggcgatgagaacgcagccgtattctttgttgggacggccacaacaattatgtctgtgcagatctaggaattttatgagcgtgtactaaacgaagcagagaatgggctggaatacggattatgacggatgtaagctcttgatgggcagcctaattctcacagactgactgtgatagcccaacttcctccacgcaggtgaccatgtccacctcgggccaggagtgtcaagtaagcggctcactgacccagctatcgacctgcacgacctccctcagattgatcttgtccttctctcccactatcacgagtatgtcccggagcctagaggtattgagcagctcattgatattgccagggaccattttgataaaaaggttgaggcttcattgaggcgcgatctacccattatcactacaccacatgcggcgcagcatctcacttcccagaaaaaggacccgtttacatctgtgtccgcgctcgatccatttgagcagatcgaggtgaatatcgaaggcacagaagagccagaacagccccgactgcgtgtgacggggatgccggggaaacatgtgcctcctaatacagtggtggagaagctcaacgagctagccagtgcggtgagttttttttttcttttttattcttttctctgaatgttcctagttagtcggatctcaacctaacaaaccaacaggtcccaccaaccaacggctggatgctcgagctaggccatggcagacccaatactgcagacttctcctgcggttatcgcatttacatctcgggggacacactactagtagacgagctgcaggaaattccaaggcgatacgcaggccaacggatcgacctgatgctcgcccatctcggcggcacaaccattccttctccattagtaggaagactaatggaaccgctagcgttgatggtcaccatggatgcggagcagggtctgaaattgatccagctgattcgaccagacgttacaattccgatccattacgatgactacgacgtgtttgcaagtccgctagaagatttcaagcgtatggtcgaggcggcggggttattggacaaggttgtatttttggatcggaaggagcagtatcgctttcgagttatgaagtaaaagagcctaatggtaacatatcgatttttgtctactccgtacgcgtgtctgcttgagctcagccccggacgcgttggtccgaggctcagaggaagggctttctcacatatttcgactccataccattcttggtgtggggaatggtacttcatctgggaattataatttgcttcgcctgaagagcgggtccttaatttcttttttaaagtctcagagaatttgggggcggtttatagccgaagtgtggtatgtatgtacggagtagtagatgacgaggctcgtatatggctcgtgttcggttcagtgtccctccatatcgtctagagtattccactttagatggcctatatgaaattgtaacgctgttctttcaaatgcttacttttctttgaggtctgttcatatggctatacatagccgtcccaggtgtagttaagactgatatagagtagagaggatatctacgtacacttgtcacatgtaattgacacaagcacccgcggactagttgtattagttactatactattaatttatccatcatatcagttacagcattcaaatactgtacgtaggtgactatactgcgctgcaaagtccaacgccgtccattgtttaccctatatatagaacaagctctccaatcacggcccgtcgaccccaggtccaccaattcagcctctgcccctctctctccctctccccttttcttttctcatcagaagcagtgatgcgcaacctctttaaaagcaggtcgccttcgaatcggacaagtcatcattctatgcgcagcgacgaacagttggcccgccccgcgtttgctccaccggaccccaacatagccgccgactcagaccggcgcctttcacaattcgagtactctgttggttctgtacaaaatcagcctcagactttaaataggtcacagagtcagcgtcataaacctttacgtgaccgaccgaccgtcaacattgtgacccctgacgactcgcatcgcaaaaagggccgtatcgagcgcagcgcctctgtgaagggcaaaacaatctcgcttcccatctcacaacctacctcacccgggactttgcatccagagaccctggacgagtctgacgagtttcacccacatcggcattccaacgcggagaacccctcaccgttaaccacaccatctcttgcccaccaacagcaatacccggctcaacgaggtccccgaccttcccatccagctcacgcccaagacaactccgggtggtcacagcaacgtttgcagccgctttataccaaattgcagcggtccaccaccgactcaaccctgcttgaacagtacgtccgcccgtcgcccaccgatatcgcccccgaatcaccgcgatacgcgtcggaacatcttcatcggggacaagctttcccccctcctcaggatccggtattgaatacccggcccccatcccagcagactcacgagccgctttccccgttacagtccatttatcctgacgccatgcagtcttccgcgcaggaatcccagaaccagagtcagttccatcagttggacagacaaagatccacaggttctccgcagcagaaccgcagtcggcagggtagtgtgtcaaacaacatgcctgatcccggacgaagcacacccaccaatacacaccgccgcgaggattccggggaagtggacgtgcgggcattgatccagaagcatgatgaactccgtaagcatcttgattccggttttgcttttcagtaaactaacgatgagcagaggccaagtattccaaggtgaaacgatactactttgaaaaggatgcgcaggttcagcatctccagaacacggtagcgcaccaacggatggcggtgtcgcgtactgtacttgacgataatgaatataccagccgattccagcgacttgacggagcgattaaagacctagcattctcagtgcgcaaagattggcgcagtattccatcctggctgaatggaatggtcaccgatgatgcgttatcggtcggcacgaaagaaatgaccgcggtcggacgtgctgtaatcagccaatggctagtagaagaagtattccagcgttatttccatccatctttggagccagcattcagcgtgcagttgaagaatatcgaaatgaacctgcgacggcagcgaccatcatccgacgaagaccgcgagaatgcctctgcgagactctcctattggcgccgcacgaccttcgacggactgagtgattccttagccggacccgaagcccaaaaacatcgcgctgagctagtcgagcacttaatcgtggaactcgctgcctttatgggatcccagctgcacgaaaccgcgctgccagggctagaggcaagcgtgcgcatgatcattgagaactctattaacatcaccgagaaaatccccctcgaagcccgcgatgtctgcgtcgattatttcccaccaggaatctccctggccgagcaatacatgaaggtggaaggccaactacccgcactgagccacccgcccccaccaccctcagaccaagagcaactcgaggagcctgccgcggtagagggggatgcctcatctggctcaaccgccggagtgatagagaacgcctcaccggcacagcaaaagcccacgaagaagtccatttttggcgcgttgataagccgcaagcatgcctctggcgagaccagtcgtccggcgccggcgcctggaccagctgaagacaagagtgagcctacggatgtagctccgagcaacccgcgtatccggttcgctgcgttcctggccgtcgaagtgcgcggcaaaggtcctgcaacggtgctgatcaagtcgcccgtgtggctagtggaataaacggtgctagatgggtacagctggattacattcgggaccacttgaaatggcccttgacctaaatggtggagggtgtacatagagaacggaggtgtcacatgctggcatggcgacgaagatcatgacttgttaatatccgttgatatcccgtggcgttcagtcgttcagcggtggcagtttgcagttgaggttggggtcgagtcttattatttttcctttgccctgacgactagaatctgggattctgctatgattgtgctcttcgagtagaaagttttggaattccatgtttcttagcggcattcttcgtagctcatccacgaactcatattcattccattactttcagtgaataccccaacacatcaataccttgaatcaataccatataccctactcagtaaatccggatccctacaaaggcggcggcgccagatccaacccctcaacctcgaatttaaatgtatcgctccgcgaataactcccggcaacatcgagatcaagccgtccacgctcacaatcatccagatcaatgcacgcgatggccaacccatcgcccgccgcgacggtaggactagactcagtagccgacatgccaagtgcggaatccgtcaccgcagcatcgctactatcgggcacgtcatccgtacagacttcccagagcggaccagcaagaacctctccaagcggcgaaacaatacaacttccaccacgacagacataatcccgtaccgagctcgaaggggccagggaatccttattattcggcgcggggggatcctcagcctggtcctgaccctgactctggccctggacctcactgtgagtttgcggccagacaatctcatgcggaccctcagtagtgatggatagtttcctagcaggatcctgcgatttacccgcggtaatatcttggttttgatttcgatcctggctttgacctgtattctcaccggtaatccactccggtagctcggagccgcgcacgcactggttcgctgagagcacgaagcagcggccttctatgccgacggtgcgcatgagcgggagccaggtactacgagcatcggctgtgggagcgagatagatattgacgttctgggagtacagactctgacgtaggaggggcatgtagttctcccagcagattgccgaggctatggttagtgggataccgtttagggttgttgtaacagcgcggagggtcgagggagacccctgagcccagatcatgcgttcagcgcccgtctatgaagatcagtataggatcgataataaaacggggggatggagagacagcgaaatccataccggcataaccttcctcctcttccccaacacacctctagcaggatcaacataaacaacagcacagtacaaactaccaccggctctttccaccaagcccgtaacgataaaaaccccagtctccctcgcgacacgctcaagaaattccctcgtcccgtctccccggaacctcttcccctccgcaatctccagcctgcgaccaatccagtcatcaccggccccagcgggcgtatcccctagatcaacagatgccttgaagtacgcgaggaattgatcccgaccgcgcgggtgccgacctcccaccgcagaaccgaaggaacatgtccgcgggtatccgcctagataggcttccgggaagaggaggaggtgaacaccgcgacgggcggcgagggcagttgttcgttcgagggcgcggagggtttcagttagagagtcgtgggtgcgggattgggcgactgctactgtaagagagggcattttgagattgatatgtttcagagttactattgggaagttgaggagagaggcgaattgggttgaacaatgacgaaatggggtttgaggggaaaccctggatgctcggaaagcttggctgtggggtagccgactttatattgaaaaaagataggaatataccttcttgtaagagttattgtaagagttataatatcaagttcgctatctaaatcacacgctacgtccgattctttgctttctttgctatggaaatagccctcgtgagctccgaatcaaccaattccaacaaccctcgagcagataatgactgtttcaactgttcaggtggagttccctccaaagacatgctcgctgtccctctaatgcattgagaggaaatagcgatagcatgatgcacggggaccccttcagcaacggccttttgcgcaacagcttgtatcgccaccgtcgtaagggcattacaaaatgcgctcattccagtcacagtatcgaaataactgtccgaaacgtgaaagacctttccaactagattaaaaatccatgaagccaattccattgcctctgttgccttgctagaaggttcagcgatgggagttgctgattcgtggatctctgttcctatagttggcattgcgcggataatctgggtattttcatttccggacgtctgatgatctccaagaagacggctgatttcagtgctcggggtttgcgcaaggatgctgataatgatcttgtgttttagagcttctctcatttcgacagcccccaggattcgctggatctgatcgacagggaaggcgaataggatagcgtctgcatttgccgttgctttgatatttcacgcgaaacaatcttcactgggaccaggctgtcgcgaaactggttttggaggcgtgttgctgattctttgcggttgagagcaacggtaatttcggagattggacttccggtttgaggaatagatggtagtagagctctcagtagtgcagaaccgatgtggcctggacatctagttaggtaactgtttggaattgatagtaaaagcgagaggaagtcatatattctattctgtcttaccacagccgagaaatgccaaacggacaggcttttgggcaagtgctattatgaacgattcgggaagcaagacaatcttctgctactgtctgggatataaggattgaaaataataggctttaggctcgcaagggtgacctattccattgccttcatgactcgggagggggatccaatgttgatagcagttgcttgtggtaagaatatttgcctgtgtaagttgtggatggtcattctttgaggttatgaacggcatacttattaatgttcgtctacctacatgtatgtagatactgttctaggaataaaatgtgacggtcaatagacagtctataaaagtccgccttcttcagggcacacgagcgatactctgggctcgaatctactatagggtaggaaagtcaaccttatatgcctctggctattgatgaaatatggctaccttgaatgtctccagcgattcacttgctgcaggaatgttgtcttttcacctggctgcctgacgatcaatacaaggagcatagaatctttaacaaccctgcctggaaacgaacgctacggggagctacatccggtgcccccaatatacagtggtctgtcttgtgccgttttgaaggaatgattttgggatgtctcgacaagcaagcgcatccgaattccaggccattggcgagaagggtctaatcaatcatgaagttccaggattgttcaggactatcatactagaagaaacggcttcaggcaatgtagaaaaacagtacaaaatcccaactgacaatctgattgcatgttgtatctacttctcataaatccaaaaaccagcaatgtacagggtaagacacccaacccgggggaccaaagcacaactatatacaaaataatccatgcagccacaaccgtcccgcatgaaaagatgcaaattggggaaaatgagtcccgggtatagcgcgcgccttactatgtgacaaacgtaaagaaatccaaaagacaaacatcaccaaaaaaaaaggaatgaaacccgaaataagcgtattccggaaatgccgcaaaaaggcaacaggaatgatgatgctgaaatgcgacaggaaaaagcaagagaaaaagtaagagaaaaagaaaatgcaaccggtccaatattttcaacagatatccgagccaatagcatattcacgaaaacctgaggtgatctatacagacatcccatgggcagcagcagcctgctggagcacacggggccagcgtgagatgagttcaacatcgtcgagggcacccttgccctggttgcgcacgtactgggtgctggggtcgatacgtggctcgtagtcccagacggtctgggtaccctggatcaaagcggagtacaccaggcggcggcggcgctgggagctcagaacatcctggtggatcttctccaaatcccagcgggcgtgggtctcctcgaggaagaatgccagtatcttagctggttcggtggtgttgggcactgcaagagggaccttggcagggctcggggtgcgagggggagtgttagaagggaaggggtagtccgcgatgttggcacgttgagggattggcgatgcgtgcggggtctcatcgggagttggcaggttgattgatgaagccaagttggtaggcttggctacggctgcgcgggtggaactcgatgggataggtaggccagctgcgaggttggtcctctcttctgggtcattgacgaggtcgtatagcataggtgggtcgatcgtcgagtagatgaacttccagcggccgcgacggatcatcatgagaggagcctgggtgccctctcccatgtactcgccgtagacagtatcggtgcggagaccttcgccgccggtcaagtacggcacgagggaaacaccatcaaggggaagctcggaaatgagtttcgcgcctgccaattcggcgaatgtagggaggaggtccatagtggagacgttttcagacacgcgtttcggggcgaaatgcttaggcgcgtgcacaaggaaaggaacacgagccgagttctcgaaccaggtcatcttgtaccacaggccgcgctcgccgagcatatcaccgtgatcaccggtgaaaacaatgatagtgtcgtcggccatgccggtgttttcaagaacacgcagcagcttgccgacgttggtatcgacgtaggtgcaggcggcatagtacgcacgacgagcggcacggatgcgctcgtcaggcatctccttattgaacaggtcaatacacttcagcacgcgctgcgagtgcgcatcctgctggtcgtgggggatagccccgttcttaggcagcgggatctcgacgtcgttgtacaggtcccagaactccttagtcatggcataagggtcatgcgggtgggtcatggagaccgtcaagcagaaaggctgctcgttgcgctgccgaacatggtcgtacaggtattgggttgacttgtagatcacctcttcgtcaaaatccaattgattggtgcgtacgacggggcctgcctccatcacggaagacatgttgtgataccagtcggcacggatgtcctacattccagttagtatagtatcacaaacggttgttcttagaattgacatacaggttcgtcccaattgacagaccagccgtagtcaccagggtaaatatcacttgtcagacgttgctcatagccatgaagctggtccgggccacagaagtgcatctttccggccaaggctgtgtggtatccctcccgccgcaaatagtgggcatatgtgggggtgtcagcgggcaggtccgccgcgttatcataggctccaattttggagggcagttggccactgaccatgacgaagcgtgaaggagcacacagtggtgagttgcagtaagctgagtcgaagaccacgcctccttcggcgagacggtctagattaggggtcttaattggggagttcttgtcgtgcaaggacaacaagggcgcagccatttggtctgccatgatgtaaaggatattgggcttcttggtggccatgatgaatacttggtttaatggacggccaatgtagataggaagttagaactaaaaaaaagagactaaattatgaagaagaaagaaagaaagaaaagaagaaagagagggagagcgggtgatatatgaagttgagggagaatgtggggaacaaaaggagaaagtaaaaaaaaagagggaaaaaaaaaaaaaaaaaaaaaaaccagtatgaaaaaaaggacaaaaaggacccaaagatggaaaaaaagaggtaattccagagaatcgggggctaaaaaagggaacacatgaaggccaagacggaaaaggctgcgtatttaatgtaatattttgccgatacacaatgaagatcatacgtatctcctcattctcatttgaccataaaccctgtagaatgctgtatattctgtagtatcctaaatcgattagtacgaaatagttcccgcctgcaacggagatcaggggaagtgatccggtactgacgtactcccccgcaaggaagatggaatcattcgagccatcgatggtgtgattgttcggaagaacctgtattgtaatataataccgaagtagataattccgagtgctactgtgtacctttacgaagtacataaactacaattctctcccgaggtccctagctgcaattggacatttccttatctctcttggcaataatcagcttgcgaatgcaaatatctagtcacaagaccggtgaattttatcaattgtaggtaatgggatcccatcggggcaagtgccgagtgagtcgccactttacaggcactataggggtcgcgtgtggtccaggtgttgcatttgtcacattgagaaagtcacaataccaccgtaataccaaccgtgcatgtaaaaccaccacaaacctcacccccttaaaactaataattgcgataaaatgatatcatgccaatgtcgggggatttaatacaaagtctagcttcagtgcagttcacacgcgcactcgaccccggagtgggtaacggcatcgaaagcccacgtccatggcagcgtttccgctgtgacaggatcctgtaaacgctaacttgttttagactagtgcatcccaaagccgaccactaggcaaaccttgggctccacaggatcgtgtcattgttttaccagccaatcaatctagttctatttctcctgggatgacccaacatggttagaggcgaggcttaggggctgaggttccacttgcttatctcaacagccaatcagactgcattattgggcactaccggggaggaaaaagagacgacgtgagaatccaagatagcgacggaggagcccgccggtggaatgctttctttttgattctttttttttgcctctgccatttcctcggtcgttccttctcactattcttgttaagaaacaaggatgaaacaaggagagggaatctaatgtatcatagctccacaatgagcaatccccctttccgagcacgccatgaggagcggtctaagatcatccccggatttacaattggtatatacttcggaggcaaaacgcagtcaccgctgtttcttagcataggtacttgcgtttctatgcacagggattgctatatgtccgacgtgctccacatggccacgtctacatcgacgtacagatttccaactcgacacgggatggtttcacccgatatagacttatgatgtacatagtcatatcctctagcgtaattaggtgtgcatgctttggttggcatctttttcccgagacatagagtaggttgctttttcttttgaagatgagtttagtcacgaggactatgatgtacgaatcactccctgctttggaaaaatatgttcccatgatgagggtacagtggctcgacgtacagagtctgcgctgctcaaatttttacatcggttgcggccgaggtggcaactgtagacggcatacccaaccaggatggtgtggctatccatatgtttaaaaagtctgtcattactgatttccacccttgaatgaagcttctttttgactgcagtcttcatgtcggcgatgccagatgcccgttgcctgagagatctagctgaggccagaccacgtgtggggcctataaagtcccagtttgttcatggacagaattggcagttgcgttctcctgcttctactccccttaattacccgagaatatataatgcgaaaaagacgtaccacatttgtttacctacagcttcatgtgatctccccgatgtagggtccttgtattcgtggcagcctgaagaaaagatgtgccctgcagcatatggagcgctagggatgcccggtcagccatatttgatcgattagtgagagatatctaaaagtgaaacaaatgccaacgtaaacttatatacaaaggtggggcatctgataaaaattggaaaagaggaaaggcaatggccacttacatgtcccttgcccgccggctttcctaggatacgttggctttacaatggacgttgatgctatataggtggaactttgccctttgattttactgacatggcaatacattagagctgattagtactaaaacgtgggcgtgcatttgtgatggaagctcggttgccttgggccgacgtatacagaatatagaagtctggcgtgagatgaaaggctccccacagcggcggatgaagatactggcttactgggcacagacaagaaacaaggaaaatctgtggcttgtgttcaacatagacgtgggaatcaaaggctcaaaaattcggacgggcagaaaatgcaggaaatagaacactatacgccgtggtggtagaagacttcacctatgcttatcgcagatcgggtcatgaaaaggtagatgttgaggagataacgagtctctggattgaagaagtcaaagaaaagaatggtgtagttgtgtcaacaattaatcaaccttgatggcactgtgtaattctcaagattagcgcgttgcctaccaaattgaatggtgcggtcttacctataaactcggcggacgaaggcataagcggccaagaaaccaacggttccggttaagaggccatacacggcgcaagcgaggaagctgtagctgaagaatagcaagcttgacacgaacccggagatgtggagcttgaacaggtaataccagatgcagtaggcaaagatccaaaaagcgctgctgccgccggtgaggaagctctgccaccaccaatgataattctaagggagtcagtatggcgattcatagttgaaactgagggcaatcttacctcagagcaaagctgactgtatgttgcgattacggtcacctcaacgacggtgataatcagcacagtcgagacaacactcaggaagccgaagacatagtaatagccagacttgtcttgccacaggttcttgaaaaggaataacagctcgataaagagaaccgcaaatggaatgacgccagttaccacgggcccgagagggctgcggagataccagggctggggtggaacttggcgggcaatcgcattcgtcttcagagggtgctcccatggtgtcgcacgcacatagccgacccagctgccaatgtacaccagcggaacttggatgaggagccagagtgcaagaaggccgatcagagtgctgaagggaattgccgtactagacgcttgggcccagacaaacaagttcagaatcaacacgaggcagaatgccaggccagggaagagcaaagcggtctagaatgatggattagcatagcacatgaataattggagcaggatacgcacaattagcgtgttcttgcgccaagcagttccgccaaaggtctggtaaagtcttcctgaaaaataaccggagaaaaggccggcgaagacgaacagccccatgccgacactaacaaagccaccacggaagcttgggttcaagactcccaggcagctgagcaagagcaagcctgaagccatgaataacaactgcattcccgacccaaccaagggggcaagaagaccactataagcggggacacggaacacatccccatggagaagcttccaaccacttgtatcttcgagagcctcatcgtccgatgaatagtccgcatcgcgctccacgtccgcgctatcgtccagaagcccctcgcccttcttctcgccggacttgcgattccggcgtcgagattggcccttcatcttccggtcgtccatagcaccatcgccgcgacccttaaggtcgccttgcactgtgcggctccagatgacgaacacggttactcccagcacggtgcaaattgtcaacgagttgataatcgccagccagtgcgttatcgaactttcgccttggttggtaaagtataaatcccagcggttggcccattcaacgttaggttcctcccggaagtagacagagtaggtgtaagggaccttcagtgtggctccgtcgtcatcgtcatcatcatctgggatatatgacagtccggagtatttttcttgcattcgcgaaaggttgggcgcgatatacaaccccagtccttcgttgttattatggacagccttggggcatccattttcctggcggtcctcggcggtaatactttttgggtacacctcaaagcctacgaccaccttccctccttccggtacgctccgccagcggatgacgatcgtgaagtggttgttgatgaagtaccgatgctgtccggtgattggagagatatctcgatagccaagcttgaatccagaagcgtaatacttgcggctgcgatccactgttacaaagctcgtggctcctggcaggttatcggcaatccattcaatcacgtatccctccttgacgagttgacgagcccatttcacatctgaccgactaacctcacgggtgcagagcgactggcactcaacatccttccccatcgtaacttcgaagtcggaggtcatgattcggtcgccacgcagtacctcgccaatattgagcgagatactttggccagatccaaacggtgagccgccatgctttttgccgctcggtgggcagacgaaaggcaggtcgaaatacgcatactgcagttgggtgtgatcggagaagattttgtttaccagaagagggatcggatcaccgtcattatatcgggtaaccgagtatcctagcgggagggaaagtggtaagcatcacatgtttagtccaaccaaaatacaccttcgtacttaccagggatgtagaatgcgccagcacaggacacgagcagcagcagccacagtgcccactggcgagaacagaactgagcgaaggccatgttcaacagatgtaaagggatctcctttgttctcgacccggagtgaacgggtagctatcgccccagcatgtacacaaagtatggagggttgtacgtcggtgggttacggtgtgtcgatccgcaaaggttgattgagcagagtgagccaagaatgactaccgtcgtaggcagtatctcgttcaggcggttctttgtcgagaggatcgatggacagttcgacggtggacttgatgtcggatgcacttgttggatgatagattgcgaaggatcaccagattgcttcagctcgccaggaacctgccgcagaacaggtaagtaacgaatgaaactggcacttaatgccacagtgatataagtgtgttgagaaaggagtttgagcaactgtgagcttgtaacagtgaagctgtccctggcctccagcgtggccccggattacctaatcagaatgccatgcgcagaacagccctggaggggaccagatcgatagatggacaaaaggcactaaaaaaaggatggtcagattcgcatatatcctaaccgatgcttgtagatcttgtaagacacttgtctcctcaactactcaaggggcaggtacaagaattggaacaatcctagtagattcactgtgcgatatatatagcatcataccctaataccctactaaccaagtacacggctttggcaaggatgaacttggcaacttcatcgatttggcaataagctgcccggccttttagatcttataccccacctgacagaatcattgcctttcctttcttgattagaagtcatatatactacctaggaaaggacctaactcctcccttggtcaacgttggtcttggtggctctggcaggaggatccatctgtcgtagatatgaagacctcttcgaactagtttcgacgaactcttctctagatcttgcagtgcgacagcaaatttctagctatacaatgaccaaacatgctattccccgggaaaacagccttggaagtatgtacgcgatcctccagagacaaagacatctcgatgctactgtgtacatattttattcaagatgtaacgtctgtgttccttttccctggtttggtataacaccaactctgtgctatgcggctgaggctggattcaagttttaaaaagattggcgcgcgatctcaagcatgaaagaaacatcaattagaaatcatccgatgctattatgagctctggagtgatgagatatccggaaaactagctaaggatcacactggagatgagcatgctaaaaggggaatgaaaagtcataagtaccgagggagcctttcatcacctcgcaaaatcaatagaagttgaatacatgagaaaagtaatcgcaaggctgtgctggaaagaaaatgaaaaacagcccagagattatcatgggtggctgaggaggtattccaccgctccctgaacactgccgcctgcgcgacgcagggcttcaatgttccgctcgaactcaaagaatcccatatcgttcaactgccgcaactgatcggcgtacctatcctccgggggacgggtgtctgtaggctgtggggcgccgaagccacctccgaaaccaccaagaccacctcccccaagtagagcggctagagggtttgcaccagcggctccaccttctgcgccctgtccacccattccctgcatcatctgtgaaagtagcgccggatcacgtaggaacggattctgctgaggattgaaagggttcatacctccctggccggcttgcccagcgttgccgaacatggccgggtttaggagagatgcgaaggggttctgagcagcttgaggggtctgaccctcggcagatgttgatcggtccgtagagtctgcacctgctgcaccgccgggctgagtggcgcccggagtggcagaaggttgggccggagctccgaacgggttagctccgaatagggcaccgaaagggtttgtgtttccaagtggattttgctgcccgaatggatttgtttgcgcgttctgttgctcggaacctggggtcgtgttcgtcacccccggggcggggaatgcattatcgccgccaccaggtccgccacccattcccatagcccgttgcatctgcatcatctgtcgaatcgagctcggatcggtcaacatgcggcggaactctgggctttccatcatctgccggactccgggtcccatgtcgcggagcatggggttctgctggatcatcatgtcgatcatagcggggttctgcaaggcttcgttgatgctcgattggaattgaggattttcgagcatgttgagcattgattcggtatctggcggaggacccatctaagtggacaaagaatgttagctatctgttggaggcattattaaactacttccatcccccataatatgtcacttaccccaccatcagggccgaaaagacccgcaccaggaagctgggcgaatccggcatatcgtgcaccggtcaagccagcaagagggttgttgccagtaccggccgcaagattggttgggacaccagctgccgccgggcttggggttgctccagctcccgcagcggctgagctgggctgagcagctgtgttctggcgctgctggttgcttgcagcactctttacgagatgaatagtatggccatccttaatcttgtaggcctccagtgtctctgtatccttcagaactctacccgagtagatcaatcgctgacgttctgcgggggtatcggcatattcggggcttgagagcttttgcttgagatctgagaccagagtggtgaggggaagggtcagggtatatttggcatctgtggatgacttgacagtgaaggtaacgggcgcctgctccgtggtggccgtttcgtcggccatggctaacggatgtatgatgattgcagaggaagtggggtgatgattgggaggtagaccaatgatgaagggtaaatccctgagactattaacgggcggatcaaacgtctgatcaagcgaactgctgtgatatggatgaaaactgcgaaagtgagatgaaatgagatagaggggagtcagtgaagccgttatgcggaggcgatctgccttgcatcaatcagcgcggcgtggaaggcggtcgaaacatgagtcacgtgccatacgcgctagtggaagctcccacacggcaaggaatattttctcttcctcacctcctcgagtttgatcacacggctacacctctctttatccgtggaaagtggtcttgaggagtttctcttttttaactccacccagcagggatgggactgatgtaatattcataccccctgacttgcaattgcatgtacaaagcttctaccttttctgtgtggtaccgggaaaccgatacctagtcgcccaccatggctaccacatcgcacatgtttatgtactccctgacgattcagcccccaactgccatcacacaggctattttgggccaatttgcaggtaccagggaccagcagatcgtcaccgcgtcaggctcgaaattgaccatccatcggcctgacccggcacagggcaagatcacaccactcttctctcaggatgttttcggcatcattcgctccctcgcagctttccgcgtagctggaagcagtaaaggtacgtcgcttttttttttcctacacccttcgtctgcccctttacgagtacaacttagtgattctccaagcttcccgggcagcacggtcctcttacgaactgaccctttgaaggagggttcagacctgccctggacagcgacgttgatactcgcaatgctttattatcaacggactgtgctgagtgaatccaatagattacatcatcatcggctccgactcgggtcgcatcacgatcgttgaatatgttccatcccagaaccgcttcaatcgcatccatatggagacatttggaaagtctggagttcgccgcgtcgtgccgggtcaatacctcgcggtagatccaaagggacgtgcgtgtctgattgcttctgtggaaaagaacaagctggtctatgttctcaatcgcaactcgcaggcagaacttaccatctcctcaccactggaagcccacaagccccagaacttggtattcgccatgatctgcttggacgttggctacgacaaccccgttttcgctgctctcgaggtggactactcggaagctgaccaggatcccaccggtcaagcgtatgaagaaatcgagaaggttttggtgtactatgagcttgacctcggtttgaaccacgttgtccgcaagtggtctgaccctgtcgaccgcacagcatccatgctcttccaggtacccggaggagatgatggtcccagtggtgtcttggtatgcgcggaggataacgttacctaccgccactctaaccaaggtgcgttccgtgtgcctatcccgcgacgcagcggggccaccgaaaatcctgagcgcaagcgatcgattgtctcgggagtcatgcacaaaatgagaggtgctttcttcttccttctccaaacagaggatggtgatctgttcaagttgaacctggaaatggtcgaagacaagcagggcaaacccaccggagaagtgaagcgactgacgatcaaatactttgatacgattcctgtatcaacgaacctgctgatcctgaagagcggtttcctctatgctgccagcgaatctggaaatcacaatttctaccaattcgaaaagcttggtgacgatcccagcgaggccttcttctctagcgactcattctcggctgatccttctgtgcccttaacgccgatctacttccatcctcgaggcgctgaaaatgtgaacctcatggaaagcatgaactctttgagccctctgattgacagcaagatcctcaatctgagtgaggatgacgcacctcaaatctacacgatctgtggctccggggcgcgaagcacattccggactctaaagcacggacttgaagtttcggagattgtggagtcggaccttcaacaggtgccttcggctgtatggacaaccaaattgacgcgaggcgatgagtttcacacatacatcattctctcctttgcaaatggtactctagtcctgagcatcggcgaaattgtcgaagaagtttcagacacaggattcctttcgtcggctccaactctggcagtgcaacaacttggtgaggattctttggtccaagttcaccctcgtggcattcgtcatatccttgcagatcagcgagtcaatgaatggcccgctccacagcatcggtctatcgttgcagcagccgcgaatgaacgtcaagttgcagtcgcactcagctctggtgaaattgtctactttgaaatggacgcagacggaacactagcggagtatgacgagcgacgacagatgtctggtactgtcacctcattgagcatgggagaggttcccgagggccgcatgcgaagctcgttcctggctgttggatgtgatgactctaccgtccgcattctcagcttgaatccagactcgactctcgagaacaaatcagttcaagcattgacatctgcaccatctgccctccaaattatggccatggctgactcgagctcgggaggcaccactctttatctccacatcggtctttactctggtgtctaccttcgtactgttttggacgaggtgaccggtgagctttcggacactcgaactcgcttcattggtgccaagcctgtgaaactatcccaggtgtccgtcaagggccaaaccgctgttctcgcgctcagcacccgtccctggctgggatactctgacgtccaaaccaagagcttcatgctcacacctctggactacgtcggactagaatggggatggaatttctccagtgagcaatgcgtggagggcatgatcggcattcaaggccgcagtctacggtatgtgatttatcccatcttcaaatttccccaaaccactccccgatcatatgatgagaaaatcaatccgaacttttatgtggatgaaactattaaaatttccaattgttcctgctgagatcaaccacttcttataccacgttgagactgccaatcgttctggactggtactaactctaaataggatcttcactgtcgaaaaattggacaacaacatgctccaagagtccatccctctctcttacactcctcgacgctttgtgaagcatcccgaacaacccctcttctacgtcattgaatctgacaacaatgtcctatctcctgccacccggcagcgactgattgatgattctcaagctcagaatggcgaggctacagacctcccccccgcagactttggatatccccgagccactggccactgggcatcatgtatccaggttgtggaaccaatcaccaccaaatccgtgatcttcaatcttgatcttgaagataacgaggcagcagtcagccttgccgcggtatctttctctagtcaagatgatgaaactttcctggttgtgggaaccgccaaggatatgaccgtcagccctccctcgtcctcttgtggtttcatccatatctatcggttccaggaagatggtcgtgagttggagttcatccacaagacccaagttgatgagccccctctcgctcttcttggcttccaaggccgcctcttggcaggcatcggccccattcttcgtgtgtacgatcttggcatgaagcaactactgcggaaatgtcaggcaccggtggtcccaaagaccattgtgggcctacagactcaaggcagtcgaatcattgtcagcgacgtccgcgagagtgtcacctacgttgtctacaagtaccaggacaatgtcttgattccgttcgcggatgattccatcgcacgatggacatcgagcacaactatggttgattacgagacgactgctggcggtgacaagttcggaaacctgtggctggtccgttgccctagtaaggtctccgaacaggccgacgaggatggatctggggcgcacctcattcatgaaaagggttatctccatgggactccgcaccgcctcgaattgatggttcacttctacgcgcaggatattcccactagtctgcacaagactcaattagtcgctggaggccgcgacattgtggtctggactggcttccaaggcacaatcggaatgtttgttccctttgccagccgtgaggatgtcgatttcttccagcttttggagacacagcttgcttcccagcaaccccctctggctggacgagaccatttgatgtaccgcggttactatgcccctgtgaagggtgttattgatggggatctttgtgaaatgtatctcctgctgcctaatgatacgaagttgatgattgcgggcgaactcgatcgatccgttcgcgagatcgagcgcaagatttcggtaagtctgcagatgttcaccagcgtgtatttgttaatccactaacattttccaggatatgcgaacaagggtggcgtattgatttctgattggttgcggcgtccgctggcgttccttgctgtcctgtacgggcttcagatacctacctctttgtcaatggatgacgattgtgcggctttgaaccgcgactaattttcgatcgaagctggaaggcactacataaacctcccatttcctctggctatcttcagccgcgtagattctcccatgatgtctcatgcctcgctcggtctgccgttcccccctcggctaatcttgagctggatgcagccggtcacttttagtgctggcttgtacgagacaagaagaagcgtgaaaacgcgtcgacgctttttgagtacgatttgatccgcaatgcaccacgggtctccgtcgtaatttatcagtcgggacaaccttgtaaagcttttatatatattataagtctgaaatgagaacaaatctattccaaatgtttctgttaaactgttcattatcttgggttcttcccttattggtgtagctatgtatgtaatatagactacacgggaaacataaatgttcctatggatcttttaacatcaattgatgtgagaataaccaactacatgcctgttgatcctcaataatctgatctatctcaatgacgatattagttatgttcaagagaacctgatatttaaatatgaaaagcgcaacttttccgaccaaccaggatcacctgacgatcggtctgccgactccctgcaacttctactttggacaccgaaatcgaattgcgccatccaagttcttcggtttactccgacactccgacactccggcacagaaggaaaagacgacaaactcgggatatcaaaatttctctcggttatggccggaaatctctggggccgaaactaggcccgggtcccatttcttttccgcgggaaaattcatgtccatgtgatattggaaacctgaaggtcctcaaatatgaccaaagagcgttacaaacgcagaaagcaagtcaacgggatattgctttgaaatcgacctcaagtcatgatgaacagatttacagatttacagatttccacggcacagcacgatgattggccacctttacgagcacggcagaagctcgggcgctctggggggaatgtggacgggtggagtccaaagggcgtgcatgtcggagtaaggcgcgctccacttctcccccttgacccatggagtttgtcttacgttgaagtcgactgcttgagtttgagaatgtgcacaaggtctgaaagaactggaagacctgggaaagaagaaaagcgcatctctagagacacgcccttcaaagccgtctgcgcatctaccaacgaatatcatgtgcgaccttgaactgaggtctgttttatgcactttggccaagcggaatgtcaatccaagggcgtgcatgatcagaacggatcctcgcgtccgaccaatcactctctcaactccgatgactctctggctgggctttccctatactgtactgtatacggttgctcagtttctagatttagggacatgtggatgatgatgatgatcatggtcgaagtataatatagatgcgccttgtacatgacaaggctgtgagtcactcgttgatttctaagaaccttgatatccgatgaggcaatctgaaaccttgttcacattgcttgttagggttcctccacacttggtgttgtgactccattgcggttgtcaacggctccaccgtttactactttttttttctttttttttctttaagaacaatctgatctggtccctattctatctttttcctttatgatactccatcttctcctgattttgacgttgtcggctgccatactattcctgcggttctctgtaggacgggtctttatattgtctttgcttttcctgtggaacaatgtcgacggcaacttcaatcatcagctctggctcagacaagctagatgcttggacccgacgatcacagccgaagatcgagatacatcttgcagggcaaaagccagggcatgtcaactcttataccacaggagagagtattgatggcagcataactgtcaccgttgaccatgagacacgatttgatgaaattgagattgcttttgaaggtacttcccattcaaagtcggcctataaacaatgctaattccttaaaaaaaaggtgtatctcgaactacagtagaacgggcatcttgccccggccgcacgggatcacaacaaatgttcctcaagctgcgccagcctattgacgagatggaatatccgacccctcgagtgctagagagtggccgatcatatgaataccccttcacattcgtcgtcccggactgcctactgccccaggtctgcacccacgccaagaagaatgctcacattcaacgatcccacactatgcttccgccaacattgggtgatcccatccttgccagcaatggcaagacattactagatgacatggcacccagcatgtcccagattgcctacacggttcgagcatctgtacttcagaaacaactcaccggccatggattcgtggccatcgccgccattgccaagaaagtccggatcatcccaactgtcgaagaagaaccccccgttgaaatttccgggagcccatctctctgcacgcgcaaagagaagagtgtcaagcgcggaacgttgcgaggcaaattgggacggattgttgcttcatcatcccagcccaaacccattcagttgcttcctctagccggcgagccaactgataccgtgagcactgtggctacagtgaacctgcgattcgatccagtcggcgacgagcaacctcccccacttggaacaatgaccagcaaactgcgtgccaacacattcttcagtgcagccccatgggaagacttcccttccacgaccggcatgcccttcgcgcatattggatgtggcctttacacagaaagcgtacctctaatgactatgtgtgtcgcatcggcccagtggacaaagcaatcgtcagccgccgactcgatgcgccgcgactccaccgactcatcatcatcatccaattcatcaactggcccatcctcggcattctccggagatacctattacaccgcatcagtcgttgtcccggtcacgttgccgaagtcgaaagccttcgtcccgactttccactcctgcttgatgtctcgcgtctacgccctcgatctctgcttgacataccacaccccggcagccaatctcatgacaccgacaatctccctccgtctcccagtccagttcacgagccaagcaaagtgtgcggaacccataaaaaccacactcggtgttactgtcacacagcaagagctggaagagttcttccacccacgcaatgtgacctctcccaccgatttttctacccacactcgtagtgatgtggttgacgtgggccttgccccgccggagtactcggaaaggttgagcgctgttagagccagccggtgagttatacgagatgtggacctcatgattctctcatttgttaatcgccaaccaatacccctaattctgttggccatggaaaagtccttttgcacagcgttaaatggttatgactttatttgcattttcgtttcgattataccctactgttcacataaaccccatttttcttatgtcgattatatgctcttagatttcgtccttttctctttaattcatttgtttcacacgaacacggttgatagacctagccttgagtcctgatttcttgccttccctgcgtatatacttcattaagcccacctccagcatagagaactgccatgcgaggaaccagaaaggccctctgtcaaattggtatgatatcgcataaacactgtgtcccttcgagttctcttttttgaagcgaaggcactacagtaatagagatcgtcgtcatcaacggctgacatctttcaacataccttatgaggactatctgtctcttgtcgtttggtaggtcaagtcgacggatttgtatatccactcattggtcttgacaacaatggaccctctcaagtccggacctccatcaattccaagagcatgacttggagagcaaaatagggagaggtcttagctttaagatcacagaggagtttgaatctcagcttcaaagcataaatgaaccattcgaggacagctttcagatatatgatccggaacacttgatcaattatcgaaaatggaaatagaaccgaggaattatatcttacacaagccagtgaattttagaaaatactacgccatattcccccgcatattccacgttgcactgcttctaaggtacgaagtaaggaccgaagtaaaaccccccgagagataaccggttcattctagtatatttcaatcttcaatcatttaacattcgaaataacccggcatattcaaaccagactctcaattaagtttatctaccaccgtttgcgatttcaagatgcctgtcaagatgttggtctttctttaccgcaaccctcgcctatcaccggaagaattcaagaagtactacgaggcacacgttaaactcgtcaagaagctagctggcggggatttccctctttctcaccatcggaactatatcgcccgcactacagttgaaatccccccggatgactccaccgcacgcaacgccttcaccccggctactatactgcgcgggcgacagccagacttcgattttgacgcctacgccgaacttactttcgcggatcaggctgcctaccaggcatttgcagccaagatatatgccccggatgccgccgcccagataaccgctgacgaggataaatttctcgatcggttgaagcaaggagttgtcttggttggggaggtgagagttactgtgagatgaggtactttgaccggagctgttcggagctgttgggagcctcatcggacttgttgcgacgcatgttgggaatttaggtgtgattgtgaggcatacatttgaatgtagtatctttcgatttgggggatattcccccaagaatctagcatatgctcaataatactctggtagtcaagtctgagtcaatgctcaacaccactagtcatcggcgatctacactcggtcacatctgaacatcccaaaatcgcaaaaggaccagatgtataaaaccaagccacgtgaggaactccctcttggcccgatcttggtccgatcatgagatcgtaagctcagtggcttaactcttggacctatcctcgatatgttccagcaaggcacatgctccagtcgcatggcctgagtgttacattggcgtcagggaccgttcctgcagcccgatcaacccggcacattaatatgtgtcaggctgcatatcctttcgaccctaaatcataactttaaatactataaaccggtttatttgcttgatatcatcacttagttacattcattaagatggggtttactgtaggactcgtatccaggacgaggggaggatgctgcagcgcccaaagataatgctcctggatgcgaacagctcgaaatgtcccggaccgaattcctccatactgactgtgtatgagtaatggatttcatatgacaatgtcacccatccgcaggagtcttcctagctgattacccggggaatctttaacccccacgaggacagatagtcgcattgtcacaaaaggatcaacccgcaatttcagaatgttacacttgggtggcatgggcatgcagatctacctagcaaagacacccttagtacaaagtagatatcatattagaatcttcacagtgtggagaggatgactgtggcgctgctcagcccgccgccaatctctataggaaacacataaccctcatattcgccatgtgaatcgccgattttctaacttgctgaatgtaacaatcgtagaactgcatcgattcctccgacatcaaggctgaagcgaggtggtatcagtcaagtcaccctctaggtagcagggtacctactgcctatctgtattgtaggcaaacggactgaatggacaattactattctccgacatctcaatactccgcggaggaaaccatttgtttgacaacgtcgactacaaatagtgagatcattcccctcatcctcgaactcaacaaccttcaacctcgcaggcccgagacaccaagaaaaaccatcttgacacactccttcatcatgcagcttttcattccttttcttctaggcctgagctggctcgccaacgctgcctacattcccgccctgagcaccaacagcactgagattgcatctcgtgatgttggcgggtaccgctcggtggcatactatgtgaactgggtaagttcagaccatatccatccatggatggataatacttatataaccgcctacctacttagataggcgggcatataaaacgtcatccaaacatccaaggaagtcacgctaatcagactatcaggccatttacggtcgtaacttccaaccccaggaccttcccgttgagcgactgactcacgtgctctatgcatttgccaatattcgcgctggcacaggcgaggtttacctatcggactcctgggctgacactgacaagcattaccccaccgattcttggaatgattccggaaacaatgtctatggctgtgttaagcagctgttcctactcaagaagaacaacaagaacctcaaggtccttctgtcgattgggggctggacctattcccccagctttgtctctgcctttgacactgagggtggacgacagaagtttgctgattctgccgtggacctgctgaagaaccttggcttcgatggtattgatgttgactatgaggtaagtcttcaaccgtttcaaggttgcgatctgctagttgctgattcttacgaataatgtagtatcctgctactgatgaccaggcggacaagtttgtcgatgcactccgacgacttcgtcaggtacgtgatcctgacgaatatcccatgagccctggctaattaaaaccaggctttggattcctacagctcggccaacgccggaggctatcatttcctgctaactgccgcatcccctgccggtaaggtttgtcttcatcgctagaatacccgtcggctgacaaagtcccaggcccagccaagtaccgccaagaacgtctgaaggagatggaccggtatctcgatttctggaatctcatggcttacgactactctggtagctgggacaaagttgctggccacaatgccaacctccacgcgtcgaccgacaacccgtccagcactccatttaacacggatcaagcagtcgactactacacctcggaaggcgtagccgccaacaagatcgtgctgggcatgcccctgtacggccgagccttcaccaataccgacggccccggaaagccctacaatggtgttggagaaggcacatgggagaacggcgtgtgggactacaagggccttccactgaccgattgcgcggtgacagtcttggatcaagtaggtgcaagctactgctacaaccaaggaagccgactgtttgtcagctatgatacaccggagattgcacgcatgaaggcgcagtacatccagtcccgcggcctgggcggtggaatgtggtgggagagcagctctgacaaaactggcggggacagtttgattacaactgtatgttaggttctggatttgttgtacatgttatacttttactgacacacacaggttgttgatacccttggaggtgtcggcgctttggagcagagcagcaaccagctgcagtaccctcactccaagtacattaacttgaagaacggcttcccttagattatcattttttggctgtcaatattgcaagattggaaatatctcgctgacatatggattcgaacatttatggctgttacgtgatgcgggcataatcccgatcagccttgatgggtgatgggatgtgcgccgcttgcttttgcatctatgtcgtacacgatctatgaactggaaaaatcaaaaatacgattaagatcgaacatcggttgaattgtatgtgtagcccagatatagtccatataaaatggcaattaggagcgtagaatagtgaaatcatatacggaagaccaaagtccacgaatatcgtggcgtgaaaccaatcatctcagtctcgatccaagtccgcaaaattattcaagacttgttctcttgaggctctcctgcgtgagaaacatcgctgacagacccaacagacggagaactacttcctcctttgccatctttactactcccagtaccctcgacaatcttatgctgtctcagcccccgataaacatcgcgaatctgcgcgacaccaccatcaaagatcggataaaagatagcaaccagcgtactgagccagagccagacgatagcgacaacgacccaggcaatatagaactgaaaggacagtcagtcaaccaaaacaccgaaagttccaagcccaagtgctaacacataccttcttcccaaagatataaccagatccatacataggcaacggccagataacccaatgtcccaagaaggtcgccacagcccaaaaagccgcgatgcgaccccaccgtttcagctctttctggtcaccggaacccctgcctccgtcctcaacactaccatcatctccacgagaagaagcctggtgacgatgcgcagtcgtcaaatcactatccaatttctcaagcgacagtttgacctttttgaagtcatcccagtcataatcctgcggacgcacaagcgtaatcaaaaccgagtacacaatgggcgagagacaagaagcgactgtcccatatacacaagggaggacttcacccgtcgacgctacggaaacttcaccgccaaaatgcgaggcagtcccgagccatacagccatacctgtagcgagaccaaggaccggagagaggatcgcggcagctttactttgacggcgccagaggatggtgaagatcattgggaagattccgggacatgtgaccacgcctaaggaggaaggaggagaatattgttagttcgagatagagagcaagttggagaagacgtaccaagcatatacagtgtccagcctagattgataccgacgtaatgtagcatggtactaaaagcagcggagaaaacagcgaagaaaatcacaccgaagtggctagcgcggatcagatcgcggtctgtggccttcttcttgaagtactcgcggtacacatcgaagctgaggatcgagctgacggcgatgacctgcgcggagagagttgatgtacacgccatgaaggttatcagcaggactgctgctgcgccgcctttaccggcgatagtgattgccgcgtatgggaggacgaggccattgctgacttctgtagttgtcattctctggtttgatgtgttagtgggatttgtgggatttggagaggtacagtgcatacccttgggaatgtggggaatgttggagtgttctcgagtcctagggcaacggagctcattactgttcctagaccccatgggatggcgaagtaggcgatgcctccaattgtatagccaggtactactgctgctgcggaggctgagaaggcttttatgaagtagcttgtgtccatctatagggggttagaatgggatagcggtgggatatataggtagtgttctgcttacaacaaccaaaccgaagtttccaagagtgtgaaggattccgaaaaggattgcctggaatattgttagtctattgtccggtaaagctagttcatttcttttgctctcacactcttcgatgtcattgtcaaatatgtcccatcttgattaccagagaccgggtgtcgttgcgccgctgcttgaacgaggtcgaacagttcacccacagagccaatctggttagttgagaaagccttgacggagaaatagcaagcaatgatcatgattatagcggtgtgaaaataatcggtgaggaaactgcatagcaggcttagatgtcttggacttccgaggttgaaggaagagcacttacgttgctttgatcccaccaacaaatgtgtagagcgtgactccgaccggcagcagaaatgttgcagcgataatatgcatcccagtgctgagttcgttagccagagaatcccaatagactgagagaaccttacacagcagtgattactgcagcggcaccgagaagcatattggcacaggcgaagatattgttcaccagacagagtatcatgaacacaatgtgtgccacatgtcctataccacgaaatggaatcagaaaatgaccagaccagagacgaaagagtacctaccatatcgaatccgaacaacctccagcgaagtatgcgcttccgggatttttcgcttgcaggatattcccaagagcgcgaagaacacaatcattggactgcagccagctgcaaaccagaatggaccggctacaccatagtcgtagccgacaaaagatgagccgagcaaagcggttgaccaaagccaagactgaaaagagtcgtttgtcagttggtattcaagcggttgagggagagtaactgaccgatatcacagctgaggcggttagacctgtgcgaacagttcgatttgctgtcatgaacctgttttccggattagtattggaggaatatcggtggaaagggttggatacatttcagtcttttcgttgtcctctccagtggttctcttcaagactttcgtgataagcatcatcactattcggtgttagctgggaatatcgtaagagtatatttgaagtactcacccaaagcaataatcacaccgataacaacaacgacaacgtacccaaccgcctgtgataaaggtggctggacagaggaaatgccatcgcgcgcatgtaagctcgacatttttttaagtctaagagcctagtcagagagaataaccgagaataaatgtgctgtttccacctattaatagggcgtagggttgaatatgtacggagcaaagagagaaggataatagccccagtagtgataccgagtacatggaacggggaccatgtacgcttaaatgatgtttcatttgactaactaatgtaccaagtccctggacagggatgagattcaaggcacatgtctgtggaataactgatatagggtccacaatggcttgatttgtgtctgcgatgaggtgctttttcacgagattggcgcggccgaaggattgtttaggttgaagtagggatatactggacgagataatactcggtatatcacaagcgtacattatttaattattagtgaaataagaacatagattggaacgggtctatcctcgtatattttatagaaggaaaggagagacagatattcaagtttaaccgtcgcagaagctaaacacccaaagtaaatattgacaattcaaccttggaagtgatttaattccctaaaattgagtacatcacaaacttcgatcttctcccaatgcccaatagagatattgcgaattcgtaagaatatggtccgggggaacgggggagcctccgcgtaatcacatcacttcatcttgtatatcgatagtcaatagattagtatatctctcgggcgagagcaagatataccaggaactagcttgtatgccgagtataattgctttttggcgaattaaaatggcctttcgcgatattcggcacgccatcgcggcccactgtgatgctataccaagtgcacagtgacgcacgcggggttctttttttttggatttggatttggataatttcaataactggatataaaggaatatgacccctcgtttctagctggggaaggatagtattgtttctttacttctagcttgcaatcctaaaatgtctaacactcaagcatcagatgcgactaagcctcgcaagtcgctcatcctcaatgcctttgtggaaatgtgtacgtcgaaggccatctaacatgtgaaaccccaatctctaacattattaacaggcagcggccatcaatcgccaggactatggcgccaccccgaagatgagtcgcatcgattcaatgatgtcgaccactgggtcgagctggcacaactactcgagtccgccaagttccatggcatttttatcgcagatgttctcggtaagtagaccgagtgtagttgcattccagtggagaagtctgacaagagtcctttctccaggaggatacgatgtctataaaggacccagaaacctcgatcccgcagttgtctccggtgctcagtggccagtgaatgagccattggctgttgtccccgcgatggcggcagctacgaagaatattggatttggagtgacggtcacgacaagctacgagcagccgtatcatcttgcgaggcgactatctactgtcgaccatcttaccaaaggacggtatgtcaatctagtaacggttgggagaacaagtcgctgattaaagtcgcctgatagtctggggtggaatgtgagtagcacgcttacctccaagagcatgactttgaaagaaatacatactaacaatctcaggtcgtaacaggctacctcgattccgccgcccgcaatatgggccaagccgagcagctacatgtaaagcctcatcttccacatccatatgtctatagcccactaacaaaagcctagcacgacgaccgctacctccttgccgaagagtacataaaagtaacctacaagctgtgggagtcctcctggcgccaagacgccgtaacgctcgaccgcgagcgcggtatctacaccgacccggcaggtgttcgacaaatcaaccacgttggcaaatacttcaacgtccccgggccccatctctgccagcccagcccacagcgcacgccggtcatcctccaagccggcacctcaaaagcaggcaaaaccttcgccgcgcaacatgcggaggctatcttcgtggcgggccacagcccggccgtggtagcgaagaacgtgaaggagattcgggagcttgcacagagcgagtacgggcgtgatccgcagagtatcaagttcctcgcacttctttgccctatcctcggcaagactgaggaagaggctgtggagaagttcaagtatttccgcagtctgggatccattgatggtgcacttgcgctgtttggtgggtggacggggattgatttggataagtatggagatgatgaggagctgcgacatgttgagagtaatgctattcggtatgtgacaatgcttcccttccttttctttctgagcatgactgactcgcacttctgtatagctctgctgtcgagggctggtccaaggcaacccctgaagtggctaaatggacaaaggccactgtcggtcaacatatcaccgtcggagggctgggtgccactcctgtcggtacagctgctcaagttgctgataacatggagcgatgggtacaagaagccgacgtggatgggtttaacctggtaagtttgtatttcctgaattatgccattgtatctggagccgtttgataacattattctcaggcatacgcaatcaagccgggctctttcaaggatatcattgatctccttattcccgagctccgcaagcgaggcctgttctgggatgactatgctgtgcccaagggaacctaccgtgagaacctatatacacagcctggccagtccggaccacgcgcagaccaccctgcctccaagtacaggtggaatgccggtgtggatgctgcagaggccgtcattccggataactgaatgttatacttgcatcaattgtacaattttgaaatgcaatgacattcaacaaataattagaacaatcaatttttagacagactatccgtagactacctgtaaggcctgcacaggacctgttctatggacgccaagaaaatgcaaattttgtacacaatcataaaccaaagctctaagtcaacatatcatcgagacgctcaccaagcaccttctcaatctgcttaacccatttgcggacttctctctcaacactctcatcctcatcttccatgagctcactgatataaggcagcatctccggtagaagtgccagccactcctcaccaagctgctccgtaagagcctgttcggtcttgagggctgcgagacgggtgtgggggctgtcgccaccagcggaccgggcattcggcgcagaggaggggcggaggtatttcatcagggcggagttcagctccttatggttatcggtagagtcggcggcgatggccagttccgtgatcgtgggcacgacgtcggcaatgaccatgttcgacgtggtcgtgctggttgcgtggcccagttgggcgatcaggggaccggaaatgctggcgaggtgggaggggctctgccagaattctgcagtggatgttagtggcagtaatcagccaagggggggctgggtcagagaggaaacgtaccatcctggtcatgctcgaaggacttgcggagcatacgaagggcagccaaccacagggacttctgggtcttggagggacccgacgtgttcaggacactgacaacgttctccaagacatagctggagtacccggtgacaattgactgaagaagtattagtgacaaagatcaatgtaaaaaagaattctgcggaaacatacctggagagtaccaaagaagacctcgaggaacttgtagaaagtcgtgaggcgtgaaatccgagcctgttcgtcctgggaggagccagtggtggcccactcaacgaacttaaggaagatgggccggaacgtgctgtcattcagcttgtagatcatcttgatggtaacgtcgttaagcgccgcttcagcctcatcaatagcagttgactcgaagatagccttatcgccaagagcaatctgttcacggcgcagatcgaacgccttgaagagaatctttgtaagcacaccaatgttcttagcaatagtcgacttggggttcttgtccacagcgattgtgacaacttccaagatttcgttcacagcaattggaccagcctggatggcgtgttgccaattgcgatcaacagcgccgagagttgcgcccacatccgctttgcgggccatcaaccgcaggcactcctggcggctttcatcactgctctcctcgatgtccgcgttagcagactcgaaggacaggagcagcatcttgtccagatggccagctgagatcatgaatggcaggtgaacgaagagggcagagaagagggcgaagacggcgtcgtggagtcgcgagttctccttgcctgaaaccaaactcaactcgagcagtcccaatgaacgcttgagtgtgtcaggaagggcaggaatcatggcctgacccagcacctcggccatagaggccaggcacaggacacccatgtaacggatgcggtcatccgattggccgaggcaagattcactggcaaccactctggccgcagcaatgaccttggacgggtccttacggccgtacttgtcggtgatgcggtcaatgcaagaaacagcagcatgcttgagcaagatatccggggacgactcgacaatgccaaccagggtaggcaggaagtcgaggacacggatctgcgacaggttgtcgcgctcggggttctggcggaggcgggtttccagcaaacgaagcaccttgcgtcgaagctcgtcattaggaccctggagaagaacctcaatggtatcgaggaagtcaaccagagacagggtgctgaacagagagccgaggacctcaccacaagcctggttaacgggcttcatactctgcacagcctcgccgatgctcagaacctgcgtcaggactcgggagaagcaagcgcgggactggtcagcaacctggtcgtccgactcgaaggctgtctcaagcttagacttgagagaagagtgcttgaacaagtgagcaaggtcacgcaggaggtcgacgcagatgctctgggcgtcgcgtccatcatcactaccaattccaagaaggacctgcgagatacctggcttgggtttgagagaatcgctgaccaagttcaagtacttgctgtaggtggtaagctccacgactggtgtagtatccgaaaccaaacctgtcattagagtgaggacatccttgtcggcagagtatcggttagcgagcattgccaggacagcaaacaagaactcttgcgttccaagcttgctgatcaaggcatggaagagtctcagacggcgatgcgaagggatgtgctcgaaggctgcggtgaaactgagcaacaactcggacgttccagagacaacatccctcttctggttacgtagggattggatgagggcaggaacaacctggtcgatagtttggtcaatgaccgaaacagagtagtcatcatccttgcgcagaacgctgctgcccatgaaagtgaagatcggcataacactgtggagaaccaattccggcgcgatgacggacaaacttcccacgagaagaagagccccgttctgaacctgcgggctgtctgtcgtccgcacgcagtccaccaccaggtcggccctgatgacggatgtatcgaacttcggcttagcagatcctttagatgtgttgacgatagccaggagactccccaaagtcaaactgaggagataactcatgccagactggatctgagacttgaagtgatgaagagcagcgagagtctggaacaatccatctacaagctcggggtgtgtttctggggaggagctatccacaatctccaagatgaaagtcatcttgtccatcaacttgctaagctctgcctcgtccttgactgtcatcgcaaccatgttgttctggctagtacgtctgcgcttcggcgcagggccaacagactcaacatcggtgatagatacggggatcttttggacaaattgctgaaggacaacaccggggagctcgacagtgcgaagaacgtctcggcagttgtttgcgagagaagcagtattggccgaacccgaaagggagatatcgagcaacttctcggatgcggccaacttgcggtcttcgggaatcttagcccagatgtgtttgatttggccaaagcaagccgcaacaaaggatgggcgcaagttgtcaccagagcttgcattggagaggaggacatcaacggcgtccttgtctttggatgtgacaatagcagcaatcaaattctccgtctcagatgccacaatgcgctctttgccacaaatttcctcgacttccctctcgttcaagcgacgccaatcctctagtaccgggagaagctcactcgtcagggttgccgtagagaccttctccacgctgttgatcaaccttaacaagctagtcttcggtgcgaaaactggcatattgacaacatgggagcagatgaaagcgaacaggctaagacggagagacttcttgagttcggtggcacccgaagtttcggacaggacgttgccccgtagggtagcttccaccgttctacgaacatggttagagtcaaggatagactcctccaaccctggaagcaatgcccgctccaggaccttttgcgcatccttagtggtgagccatgcaacaccagtggattgcttgcccttgccgtagatcgtgtcgtgagcccatggcttcgagctgtcaccgccattattctttttgtacaaaaatccgataatagccaagacgccagcggtctcacggcgaatccgttcggaaggatcggagagggccacaaacaggaatggcaggagtgcctgaggatcaaagtctgcaggtgccgatgaaagaacagatgacacgacgttcaaagccgcaatcttcgttccgatggggtagtggccaacaaggactctgataaagaatgacaaatattgaggggccttggtcgcctgggacttgcctaagattggcaaagtagtgaaacgctccagattgtcctcggagtccaccgccaaggcgaaaacgcgtacaaggttatcaaattcgatgatcgactgtctggagaggaacgagcgtgggaacaaggactctttgaccaaagtctccagagctggagtaaaggcgtccacctgtggctgatcgtccgcatcgatcatatccacatcttcgatggcctgtgccacaacgggggcctcgacaacagtttgaaggttgtgttccagcgccgagatgttgaacgaagatccagtcaaagtcctctggaaaatgggttggagggtttccgaccggttgaatccttggaccaattcagcgagctgggtctgggcatccaaggacattcctcgggtctcatctgcattagaagctgcttcgagcacgaggctcatagccttggcgatttcgttctcgccaagcatcttgcgctcaaagatggaggccagaattgcgaggcgggcattgtcttgcttgtcaagatcagtcaagcagccggcaatgatcccaagtagcagattagatgtctgatattgcggtgcgatttcagaaagctgggcgatgggattttcaaggcgcacaatacccttgaagacctttttcgggactgcaacagcaggcttctgctgtgcaaggaccgaaaggcaaatcagaccagatatctttgtatcttctgtccaagaacccacaacactctccattagaccatcgataacttcgttcgataggaaggccttctgtgccaggacaacacagatcatatagcagccaacgatcaattcggacacctttttcattgtgaaagcgttactgagtaccggtaaaatccgcaaaaggatatcttcatgcttttgcttctcggcctctcttctccctgagcgagcaccatccaacattgttgcgattgcctctgtaacaactccggcccaaaatgcaagtagtgcatggctttgggcctgctgcctacagactttaaggacatattcgttgaattcggaaaagaaagccttgttcgtcgctgcgctgtgaacaagtgggtgtcttggcggattgatgagaccgttcttgtatggagcgagaactttgaatgccggcgtgagagttgccggaagaatggatagaaggttcagaaagagtggtgtcgtgtgatacggtaagaacgtcaataatacggctgtcgtattgaactcgtggatcctgccatacaagtcagcaaccacgtctcgcgatctcacgatctgcgctccacctcgcggatgtccctcacctgaatcttctcacaagccagtccacagccttgactgcgggactcaactgtagccttccgctaaccagagccaggaaagcttcaaccgcagtatctaactccttgttctgaaggacgttcatctgactgcggtcctccgctttgctctgctcactgaagatcgtgcgatcaaactcggcaaaccgggggtccaacgagcataattcccggaacccatcataacaaatatcatagatcgcatcaaagtcctgagtgccggcgacctttggatcaaaaataagtgactgtgagtgtgaaacccgttgcgccttgaggtcaagctcatgtgtcgatttggccgcaatttgcgacagctgcgcggcgagagacgaagccattgtgaagtctcttttggcgggatgttccgcggacttttcttgttgttctgtattgatgctcacacaattgcgcagtgacccatatccctgagacttgtgacggtagtcttttctttgtttgcgagccaaggggaagcggttaaattatttgaggtaagtcttaagctttgtttgaccaagagcaaatggttgacttttttttttgccgatcagcccgaccgccctcggagaatcgttcttccgagttatcagaccgcggcgcgactcgataaggaatattcgataaggaatatcgagccaccacgatggactcgcccgggtctcaggttagttaccttcacgtacaccaaatgagaagcaaagactaaccaggtacgaagggtgtcccgcaattctccagcttccgacctccccctacctctcctccggccggcgttgccggctcgcaacatgaacgtcaccggcgtcgtcgcttgggccaccgtcagcgtgcagactctaaagggtctccgcttcctcgtcaccatggaaggcgttcagagggcggtcgtcagaaggcgacaggtgaagaaagtgagaagcgcccgagtggggaaaaaattaaggatgtaaacgctgcaaacggtgaggcaaacaaaacatttgtcgtcgacaagcgcggtgatcgcgacaatacacgttacggcgtagatcgttatgagattcccacgtaccaccgcaacggcgatggctttgtacttggactccccggtcagcgtattgattacaaaacgcggtatgaccagggtgcccttctgcttcttcgccccgactcaagctcctctacaagctctactaccaagccgctctccgcggaaaccctatctgctttgtccatcagtctccccgttcgcctccgttctgacctcaaggctaacgttgccactgagacccaacattcacaaggtttcatttcaacaacagttccgtctcaacccggtgttgcggcaactgccgacttagatgatgaagcaccgtcttatcgctccatccatgacccggctaaatccggagaacaagtcactgagcacattgacacgagcgcatttactcgaattgccatggaagctgagatcttgaagatcaatgccaagttgaacagcgcagtggaaaaacgaccaactgatatccagtcatggatccgccttgctgagcatcaagaactcgctctcactggcgcacgatctggcgatcgaacctcctctcatgatgatgcacaagttgtggcaagagccaagctgtatgtgtatgaaagagcgctcaaggctaacgcacaaaatcctgcacgggatcaccttgtgctgtgccgtatggaagagggtgggaaaatatgggacgacgcaaaactcgcattggaatgggacgaagtgttgcggtaccactccgagttcataactgtatggatccagtatcttgactactgtcagactgatagtcgggatttcaacttcaatgactgcttcaccacttatggctactgtttgaagacccattcacgtgtcggctttggaccgcagaaatctctcatcagggcgtacttgctgctccgtttgaccctgttccttcgagaatccggccacgtagagctagctgtcggtttatggcaagcggtgctcgaatttacatgcttccggccagcccatctaatgggaaagaaagaagaggccctagtggaattcaaaaagttgtgggcacctggtcacatccggattggggagcccggttggcagccctggaacagcggacaaacctcccgtgttcccgccgccgagcctgtctacacttctgaggcggatgccctaggcttgttcccaacctgggtacatgcagaaagggagcggatgttcaaaaatcgcatgccgtcacatgcctttgacgattccaaaaagaaagacgctttccgagtggtcctcatcgaagattgtacgcagatactgccatatttctgggacttggaagaaggccttggttccctacttgatggcttcttgtatttttgccgtttgccccacttgacagtgcctgcgaatatgcacaccagccgactgtggactggtgataatttcctgcgaaatgaatttatggatgatcctcgcaacacaatcgcggactggatcacttttcagaaacatgctgcaaccacaaccattgagcctttcgcattccctcaccacaccttcgttcacaccactgatactctatttgccgacccaaagatgtggttttccgctctgacgaagtgggctgcaaccacctctcattcctcatgtgtcatcgatcctgattttgtactctcaactctccattcccttgtcgacgccttcggagacagccaattggctgaatatgctatggcagtaactttcgcgtgtaacaacactctgggcaagaaatatggaaggcgactcttaaaagagcgatcgtcgaacctgcgactttacaatgccgttgcgctcatgtattggcgaagtggcgatcgtgacgttgcttacaatgtgtggtccactgctttgtctatgagcaagaattttgacgctcgggagctcactgactctgcgctcctgtggaactcgtggctttgggaaatgcttcacgatgggcaaaagaatcgagcatcgtacctcttgcaggctatgccataccgtcaagttcacttgccgtcatacaacgcggctggtgaggatgatgaccttggtcttactggacccaattttctcagcgtcagccaggcaagtttccatccgttggtctcaatgaacgtcgtactaattattcacagtacttgtttaacgctatgaacactgccttgaggtccaagagaatgcaagcatacgcagcttacgctgactgctatgccatcctcctctatctcaagggcgagcaacttgatgatgtcctggattcctacaatcacgctgtctcttcccttagaggcatgcgcaggaccgacgatgatttcagggtgttgggcggagaattgctgcaccaagcccgagcccggatcttgtactactacgtggagagacagagtggccaatttagacctgctgaagttcgtgcgctgtttctggatagcctagaatggtggccccacaacactatgttcttgtcactgttcaaatggaacgagtctcgcctgcatatgagcgatcggacccgcgatatcttcgacgtcaccatcggggcgaacggcagggccgctaaggatctacaagggcctgccccaatctaccgtgtacctgtcacgactcaccttttcagcatctacgctgaaatgggtcgccctctcatgctcggctcgaccccgcattccatccgggcagccttcgagcgagcgatcggtgatgtcatcccgatggggcggactgcaacacggaagagtcccttcgacctggcaagctcgacctccgcccagaccagcctcaccatctggaagctgtacatcctctacgagctgtacgcggagtgcaacgtcggccgcgcccgcgaggtctacttccgggcgctgcgctcctgcccctggtctaaggagctgtatatgttcggctttgagcacctgcgggcggacttgaccaaccgcctgcccccctgccgcctcaaccggaagggggaggtcgaacctttggggttcgaccatgcagcgctccgagctctgtactcggacatgctgcgccgtggacttcgagtccactgtcatgtggagggtttctgggccgagtaggcccagaagggatctgaccgtgggggacgaaggggggaggaaggggagtgaacagtggggaatacaacgatgaacaggtgaagggggtgcttctcagatccccttcacctggatgcaagagtaatgtcaaatcgaactgagaagtgaaaattccgtgcttcatctgtagttgtatgggtctgacagcgttataatctcggggaactagtgacagtgtagaagctatttagacggagactatcagagctactaagaccagaaagtccgggtgcattacatattggttcgacaccggcgggttgccagcctccaatacttccacgctcaagtcttaagatgaaataaggcgacgcgggtatccttgcagaggcaataacatccatgaaccacatctttaaccacatttaaacatatttgtttcaacaatcaaggcgcccaaagctgaccatcggtctataacatgcagtctttgaagtcacatcctttccatccatgtatttggccgagagaagagagaggccctggcacagttcaaatgattaagggactggaatatacggcaattgggggatgctgccaaaagcccatacgcttggtgtaagacattcctcgattgaactccattcggcaatggcaggtaacgggagcaaagaactgttacaatgggacccaacatctcaattggaaaaataaatgaaatcgcgctgtaatataatctgtcttggcgagacaccattatgactcctcagtgaagaaccgattctcgggtctcgacaggccaaaatgttcacgtagtgtcgatcccgtatactcattgcggaaaaggcctcttcgctgaagttcaggaatcaatctatctgtcacctcttccaggccctgtggcaagaacggaaacgtgcatgtgaagccatcagaagcctctccacgcaaccacgtccccatctcctcagcgatgtcactcggcgaaccgaggaatgtcagtcctgagtatccaccatatcgttgcgcaagttgacggatcgtcagtccctcttgcttggccagcttttcaacagactccctgctcgtcttgctggcattcgtctcgggcaggtcgtccgctaacaaactattgggatcaaggccactgacatccacgccaagtgagattgacaaagaagcgatggcactgtcgtagtggaccaaactatccaacttgagtctcttctcccgcgcatcttgcttgctatccccaacaataatcattgccgcgggtaagatcttcaactgtcccctcttccggcccgctcgctccactcgccccttgatatccgcatacagcgccttggcactatcaatatccttcggactgcaaaatacaacctcggcagtctcagccgcaagttgtcgtcccggctcgctttgccctgcttgaacaataaccggccatccctgcggtggtctggcaatattcaacggtcctcgaaccttcaattcgtcgccggaatggttcagcacatgcattctcgctggatcaaaatattcccccgtctcgacattgcgaataaaagcatcatcggcgaaactatcccagagccccgtaacgatgtcatagaattcacgggcacgcttataacgatcaccatgggccaagtgctcatcgaatccgaaattatgacttgactccgggtttccggtggtcacaatattccatgctgctcgcccgccactcaggtgatccagactagcaaatcgccgggcaacatggtacggtgcgtcgtaagttgtactagcagtggctgcgagaccgatcttctctgtcacggcagagagggcggagagtagagtgaaaggttcgaatgaagtaaccgtatggctccgcttaagagcttcgacgggcatgttcagaacggccaggtgatcagccataaagaaggcgtcgaatttggcggcctctagcttttgggcgaactgtgtgatgtgtttgaaattgaagttggcgtcgggataggagcccggatagcgccatgcacctgtgtgcagtgagactggccgcatgaaggccgtaagatgcagctgacggttgggttgcgagtcggtcatcttgaaattggtttgggtgtccaccagattggacttcgaatcttgccgagtaggattcatacaaatattttgggacgagaatagctattgttatatacgcttatcactcgtatccacggctgctgttttgtggtatttccaagcagatttataagccttgctcacttgggcttgatatggcgtgcttgaagctgcatatatatagctgcgtagaacgtgaaacacaaaaccacgcctcatgaaaatatccaacggattgtagttacctatgtgatgtttccaatgttaggctagtcatacctacttttcaaaagatcggcatgagaaagccaccagatagcattgcccagttttgctctcctagaggcttatgcttcattgcatcgtaccctcttacaactagcaggaatgctaaacgaaacagaccagatacgtctcgcctggcgcttttctctgaatcagaatcacagtattagcgacatcccattcccgtttggcttttcagagtaagactttgagcgcattaagctgggcagcgatgatgcggtagcaggaactgagcttatgtctgagatcaaggagaaaatgggcgatttgtggcctgacaaaggctttatcgaatacgaggcgatacggtgattgcacaaatattaaaccaattggctgagactgacgatgaaaaagcggagtaccagcgtaattggccattggaatgttctcatgctttggggtcaatactggctctgaatttttctaacaataagattctatatacgatcattcaggttgagaggtgggtatttgggaggcaagttggatgcttccgttgaagtatacgcctttagtgcagttattgtacgaaacacagctcagcaaaaacatcactgccctcataggtctaacatatggtgccagctagtctcgaccaagtacatttacactttgtcctaggaaatctctagagatttaatctgacgtcacgacctgcgtggagccctcttgtatagacctaaattcatgaatttgaacctgtccttcgctttatctgtgcgcagtgctgagacacataattcagaatcaaccggtggaccgatggacccacgcatatgaaggtgatcatttactcatttaagccggctagtgttggcttcctactaagagacctatttaacaggtctcggccaattcagcttcaatgattcccaacccgtcgccttcacggacccagaatttcaggactcgcagaccaacagatgtcagtaggtcactccagcgctgacgggttctttccaatccggaacagaataccatgaccgcgatatctgtcatacaaggaagcgagcgagcattctgatcaggaagaatatactcctccatgatgaccttggagaacccgcgcttcatagccggcttgaggtggttaaagatgatcgtcgccttctcgtcagaccaatcatgcaacacgttcttgaaatagtacgcgcgtgcccctgcacattaatagatattcgttagccctatccaaatgcaaacacacacacatatacaaggcagtcttaccttgaaccggttgaacctcagcaaagaaatcgtgcgcaacagtgtcaatagacgccgcctctagatcctgtgcgccacgtacttcatcaatcacagaggaaagatcctccaataccaatttacccggggcatcggggaatctctgcctaaatccaatcaagtcatgtccgcgaccagcgccaaggtctaccaaaagtggtgtatcgggggtaatctccgcgtggtcgagaagcttttcacgaaccgggaaccagtcaccccagtgtggacggtcagcccgctgcccttccatgaagctattgaaccgggttaacgcttcgggatcttggcagagccatgtaaatccatcgatcttcagatcatgcgtgtattgaagaggggcccacatgggatcgtctgggttccgatagttggtagattgaagatattcggggactttctggaccgagggtagaaactcatggaagctgattaggttagtatacaaacgtattaagatcttggtctctttttacgagtttgtagcagcttacagtgatcccacgactccaatcgatgtgcgctcggtcatttctcggcatagcgctgtagataggtattcgctgggagctgactcttcgacgaagccattggcgactagaactctcataatacgctctggaaacaagttagaaaattcccgttctcaagtagttacttaccgactagaagagggtccgccggctttgctgcagccaattcggccagggggactggacccgtggcctgagacaaaacggggaatacattcatatcatgggccgtcttcacggccatgagaataataggcttggcaaatggttagcaggacattccataattcacaggcaatgttgatgacttacagaaaaggaaagcttgaggattgcatccttgggacgttccagcgcacgcgccagctgtgccgccttttcctgagcttcaactcgacaggtatcggtttgagttgactcgtacgaatcaagtgaagccttagcttccgccaagagcctctgaagatgtttggtttccatattcaaagttgtggccaaggagaacgagggggaaaccacaacggctggatcaggaggggcattcggccaccacccacttgacggtactccgtcgaaccccgagatttacacggctttcacacccggagcatcgtgctcaagtccccactggggggctggaaaacggaaaaccggggccatggagaagcgctcgaccgatgccaaaccagtcaagcctacgcgtccccgcccattataggctggtttgatcccgaaacgcttctctcgcacaagcctatgtacaagcacggctgtggagacggttgcatatctttgaacgaggacaagactgcagtctacgagactgtgaatcgaaattcatcttatttgccttatgcattctgacccacattcccacacttcgtacgtaacagagtagtactccgtagttcgaagggcacgttctgttcagggagaatgccccgaacaaattgggattttcatcgcccatacctcattgacctggccttattccccgccaaccccatatttatctgccgatccaaagttaatagaccttactcacgagtatttggcaatctagcatgacatttctatctctatatgtatacatgagataatatattagggtgtacggtatatttgtatatcccaacttcatcgaattcatgatattgtaagtgtatgttagtgaagactaccacatcatgtcttggcagtgactccaccatgacagcagacacgggagactccccacacccggacccaaggcaccgggtcttgggataagattattctcgatccatggatatttccagatattgagttcgctagtcaatcagatagtatctatttcgtctttgaaaagattttcagggtcacttagtcgaggtttggccttatgttgcttattcttgctatttagagggtgtggtttcagccttgcaaagaaaagaaaaaacaatgatcccgtggcttgggtgatcgtggacttgttcattccagcctatatcgaaagcatagagcgacttaccatcaccatggcctacaacgtttcggcagagttgttcgcagaatgggctatagggctggtcatcattgcagttcgcctttacgcacggtggaaagttggaaagggcaagttttactgggatgatttatgtctagtattagccacggtcagtccttgtgcatttcgaatgaggtaatgatactaactgcgaaaagatattctggacaatgcacaccgtcttcctctacctctgtacaggtatgttttcttctagctccctgctctgtttccatgttaattcaagacagatgtatacggatcgaatattggtctcaacgagaagacggcgatggaggtgccagacagccaagtcgcaacactacgaaccggctccatcgacgcatttgttgcctgggtctcttatgtcttcatggtgtggttatttaaaggggtcctgatgtttctctacaacagattgacgtgcgtcgttgactcctttcagctattcaaaacctatgctaaccaagcgacagaatgggtctctggcagcaccgcttgactatgaccgtcggagccttgtgtatctgcacattcctcgcgtcgttgtttttccacgtctttatttgccacccagtacacaagagttggcaaatcaagccatatgctggaggtgagatgaataattccgaggtcaaattttgtggttgctaactccatcgacagataactgtactatacgtccgttgaactatatcgtcatcgaaaccctcagtatcacgtcagtactaagttttcccaacccccgttggccatatataaactaactacttgagcagaactgacattgcggtcctaacaatccccattccgctgattatagcggcccggatcccaatctcccaaaagctactcctctgcatcctcttctcatccggaatcttcgtcatgatcgctggcttcctccgcgcatattactccgtcaaagacatctccgaactgtcaaccgccctaggctgggcctcccgcgaagccctcgtctccgtgataacaatttgcgcccccggaattaagctacttatcagcaattcgcgctggttctcgacaaatggcagttcaaaccatatcagccagacgccaaagggaagcaatctctttacttcgaagagtcggggtggggataacaagcatccgtatgagctgtcgtcgatggcttgggggaagtcgcggcgagattcgacgggtgagagccaacagcatattgttgttgatacgaatcggagtggaagaggctcattcgacgattacaaagaaggaattgcggtcaccacggatgtcacggtgtctgaagaaacgcgttctcggaatgaagggcatgcctaatgatgtgaggtttatataatatttaatatctatagtattttctatgtctttaatgatattctctcccccttattggtgctgtgattagaagcatatgaaggattggctgcgaaatataaactagtgaaaagcatacctaggtataacctgtgaaatatataatacgcaataaaacagaaggggtaagttaagagttattaccccctacacagagaacttcgacatactgagaaaatcagaactctacacgacctcataatacggacatattgaaaacaaaacagtattattcagaggacgttgtcaagtctattgccatatattcctacaatccagcattcccgctggtacccacgtgtgttgtgattgcttctctccctgttggccatgagcagagggcttcatgcctccattaaagatgtgaaatccagtgtagaagggacaacctagagagtccatgaaaccatggaagagtaataataaagagagagattcgtgactcgtatcattcatatatgatagaacaaagatgagaaaagcaaaagcgcaccagaaacaagactagaagtgttccttccagaatttgaaccggacgtccttggttgatgaagatttggctgcgtcgctgatctgcatggcagcagtattaggaccacagaagtacacacctatatcggtggtaccggcactctgcagacccgtcatgtaggactgatccagcaagccatgccgcatagcagtgaaaagtcgtctgaagtccggacgaccgaaattcgtccgactctttagctcggtgagagggtcgagggcctgaccgacggaattgagatagatatttgcggcagtgtcggggtcgagacgctgcgtgaggtaggtgtggatacgcaagaactccgtgcttccctcgctaacagccgcgctggcggattgtgcttctagggaagatagcaaagcttggaaccattcaaatgacgaggtatccttacaaacccagataaactcgacacgtcgcagtcgacgaggagggttcggacttgatcggagatgccaaatgtttttgagaatagatgcccagggcgtgacgccaatgccggtgccgatgagcacggcgatttcattgtcgaatacatcttcggcgggtgcaccatatggtccatccacacggatcgcgggcatggtctgtccgttctggagggcaacttcgtacatgccgttggggtcgagaccttcaagatctttggcttgggcgggaccgcagccgagtgcatctccaagtgctcgggtgaagtctccgacttggcggacgtggatgctgagatatggatcgaaggggcaggaggtaatggtgaatggatgccactgggtgctggatacgtcaggtacttggagaaatacccactgtccggctttgtacttcatgcttggtttgtgaaactggatctccatggcggctaaggtcattggttagctgtggtcaacccagacactcatgaaagcatgggatcgtaccataaggatgacggataacttttgtgatcaccgtcatgcgccgagatcggatctctctgtagagtcgctcaaagagatacaaagctccgatgaccaactcccatctccacccttcatagccaagacaatgatcccaaaactcttgtcctgcaaaaggggagatacggtggtcggtgtctcggacgaagcatccagtggcgtgggtataaagcgccaacataaatgggataaagaggtgatgcgcataccagaaagtttcatatgcctgctgacgaatgcggtgatgtgcggttgtatacatgagcatcatgcacaagagcatgacatggcccgtgataccactcgcgcgagcaaaatggatctctactgcaagttctggacggatttgctcttgttcgatgttgtagaaactggttaatgttagcaaagtgactgggacaaactgaatgagtgaacggcttacttgacgtagtgagaagcggtgtggatagctgtgaatactagcatggcataagctatttgccgatggaaccatgccgactcatctagtggtagccatctgatttgtggtctcagccatcgaaggatgttccgacacatgggaaataggatcaaagtgcaatcgaccgaaagaacgagacctgcgcctcttgatatccagactgaatagctgagcctattcagcaactccaactttggatttgatgcctgtagatacctttgagaatgtcagcaacgcggtttaggaactggtatacgtcagaatacataccatcctacagcaaagataccaatatgtgaaccccaaaagaacaaatggaacaagaccttggaaacagtcaactccgacttattccaccaggaggcttgagctggggccattctttctcttcgtttttaagaatgtcgaccagcgacgagtaatttaggcgataaaagacgattcaatcaaaggagtgacaagtccagacggttgaccagcaacccggtaatatacactgaagctcagtcgaaagcgaaatctcctgatcctcttttgtggcaagactccagtgtcaatattgagaggtcagtggcttcggaatttgtcaacgcccttgtttctccatgaaattggtgtaaaccagaatcttccgggacaacccgcttgaagacgaagagcaggttcgaaaatgttccaaatactctggaacacctcgctctgggaaagcaaactcgcagcttgcgatagtgctcaataaagatgtatagaagcttgaatgtgggttgcgcgccttgtcgcaagcgctgctggcgttccgccgggggatttcctcgcacttattctctctaatatgagaggttactggcacacttgagataaaatatgatattttatcggttggttcaagttgccctagacatggttggcgtcaatagatgaataaggacaggaccggaggtgagttggaggttcagagaatcccagtgttgtggttttagctgcaggggtggggggcggccgatctataattacatcgcttctggcgggcactactccgtctaaccgtctaaccgactgtggtagatttctgtccaataaactaaggagcattcaagcctacggtgtctgtgctttccaaattctcctaagaatggggagtggaaagagaccaagagacgaagtcccagggctagaatcttggtcgcttaaaagcctcgtcagtttttgcctggtctctttcaactgctatcttggcttattctttccgaggctttcaaaggtcttgcttatcatgctgggctccagtttatattaatactctgaaaagtttgctatttttaatgaccgttcgtagcaggcacaccaatcatgacacggagtttatacgtctgaagtctgaccaccgtgccacgttccccgcgatgaagcgagtcagtcaaaggaagcagacgcagttcgaccaatcttatccgatttgggttcttgctccaataatggcgggcttaggcgggtggaagctaaacgggtcgacgccgcagtccaaaagagagtaatgccccggtggtgacagagaggctggtgagtggccgtgaggactgtgagtggacagcgttaaatgaggccaaggaacgagagttgatgagatattggcctattataatccacctgcaagcgctgtcttttcgtcacacgggacgccgagggtcgcccagcatcggtgagaatacctgtcattcggttcaggatccttagtgcattgacgattcgcccaaatatagtgactcgggctctgtttccccatcaacgatttttttttctctcccgataaaagtctccacttagcactgcaggttaaatcaggcacggattgacattgcagaagatgtcgaaagacggtgtgttgcactgaattggaatcagggctactgtggtcatctgatctggaatgttccaaacttgtctctagtacaaagatgagacaacccagacaacccagacagtgtagaaagcatagtcctcggctgaaagcctcaataataaaattacaattcgaatgtcgatgagacttgaaagtgaaggaccctgtgcgtgccatgcgtgccacctgcagttcatcacgccaagcgcaagctgcggcctctgatttgcggacatccactttgcgatccgctccgtcacatcccccactctccaatcacgcggcctaagccggttcttcaagaagctcaggaagagggggttgtcaaggattcgaggactttcgagccgatgattggtctacattacttgtatccgtgcggatcacggtttagccctactcttcttgcatgtgtaccaaccccggcgcagcgattcacctttttggcgctcgacaatcacatcctggcaaagtgtgccaagttctggttgagttaccagaggggtcggtagtctaagtatagattcttatacctagtccaacctgcaagtatgtcactcggagcatgctgctttttctttccccatatgagatcatgttactacgataaatccttgcaatattatccactttccatgtgctctggattctccaacttaatcaaagtctctgtggcttgcgatcatacgatgaagtgatcctctcacagaagacgtcgcagctatttggggtttgcggcatatgtcgcccaggattagctccgcactttgtcacttacactaaagtgactttatttcctccgagaccttcgctggacgaagctcaaccacacacaacaagttttcgctcggccaagtgcccataactcagcacaatgggcaggctcatcaagaaccattgggggcggttaatcattctcaccgcagcagcttgtatgttgcccactaaacactcccagcctgaagccggagctgacagaattcaaacagatcaggtcgccagtgctgttgagggctttatttggcccaaagtattctgggactttatctccaggaacctcgatgccgccgttgccccggtacccgttctccaaatcctaaacctcatcatgggcctcgtcggcatagcctgggaatggcctcttaagccacttgctggctcaataccgcatcgcagcattgaaatccgtctcatcatataccccctcagcgccctcctcgcggcgcttctctatcaagggaccgaccctgcaatatattatttgattggcatcggtgtttatttctgggcctacagtgaaggcgaggtatgttcttcggcttatgtggacataggctgttcttgtgctaacgagaggatgtataggtcgtctgtccggagccttggactttgccgaaacggcaaggaatatttaaagcataacaatggttcagtctggtgcgttggacgcatcagacggagatagtgtaaatagcctaatacataacgaacttgacgacttgaaagagtgacattgcttgtatcattaatccccgtctaggttgtgtggtcatatggtctggactgataaccagttgtggagaatccggcccctgttactgattctcgctccggcccccgagatcgtttcttaaattggcctccagctcgtctttcctccctcttagtctaccggcattcacccagatgagaacagatgaggagggaaagtcagctcgagtacgtcgtccgctgatcgggttcaaaagatgcgaagtcgctttggacatcgacggcgttaataatgggctgtgtgatgcccgaatgggaatactgacttgggacttcatgatgggtgtcggtatgggaatgctagaatttgtatatagaatgtttctgaggcggtctggttactcctcgagataggaggattggatatggttcatttagcgcttgaggtcttgtgacgtttcgagtattaggcacctcgagtgccagccattatccagccattatccagcacatggaggtgtacttgcggctttggtatataggattgaggggaaggcggcgatattcatagggaaaagagagaaagagaacagaaagcaccacagaaactaaaattcctgttctgagcctagggcggccatatcccagttagacatacctacctatggatgttgtacctagttaggtagggagatggacagtaaaagcggctagggacggggctaaaccaaaacggggaaacatgagggcgccataccaggaagggaagggtcgggcggaggtgggcaggcggtcgaattcggcatgtacagtatcgcctggcacgtgatgctctgtccggaccaaaaaaaaaaaaaaacgtcattttgataagaatactcccactacttttagaggtccagaagatcccatataaatgtctcgcccgttgtctatatgtcattacctagctgcttggaaactgagaactaacccaatctgactgacaccagacaagatgcctgcgtctacagaagtccaacccaaactcgaggaagacgagacggcacttgaaacagtggaggatgttcctgtcaacaaaatgaccagcttcaatggcaggctgcagcaattcctacataatgggaccgcaacacgcgaagccctgagtacctcgagaactactatatcccaacgccgcataaacaccaccaacgaacgccaagcagaccccattacccccagcccaagacgcaagagaacagtgccaccaacagcgccaataaccacagccacacatcaacgcaccacccgttcaaaatcaaccctaatggcaacgtctccatctccaagcaaacgcaagcgcacagcaaccccacaaatcccgcccacgccgccaatagcgggtcctccagctacagaatccctcctccgcgacacgatccccccgaacctgatcctcctactcgtaggcgtgaacccgggaataatgacaggggtaacggggtacgcctacgcacacccgtcaaaccttttctggaaactgctctattcgtcggggataacaagcgtgcgccacatacccgccgacacatacaagcttcctgcgctatacagcgtaggcaacacgaacattgtggagcggccgacgcgcgacgcgagcatgctcagccgcgcggagatggatgctggtgttcctgtgcttgaggccaaggttgcggcgcagaggcctgaggttgtttgtcttgttgggaagagtatttgggaggctgtttggcgggttaggcatgggagggggattcggaaggaggagtttcggtatggctggcaggcggagacggagaatatgggtcgtggtgatggttgggctggtgcgccggttttcgtcgctacaacgactagtgggcttgcggctgggatgaagcctgccgaaaaggaagctgtttgggcggaattggggagttgggttgtaaagaggaggcaggagagggggttggattctgtggtggttaaggaggaggtttgatgtgagaggtttggatttactgttgcttttatttgtatagataatgtcgctataccataaactatcatgagtcatgatcattgcttgctagagtgttggatggatttacgaattggaatgttcaagatgagattgggcaaaaaaatgtttgtatttgtagacgagtgaagtcgctcatcattcatcatctcatgatatcaggtgcagaagcctgtgagtaccaatatgcaatcccagaaacggcgaacactcccccccaagcccattccacagctgaagatataaagggtgctacatgacgttttccgaaaggacaatgcgccgaagtgccagacaagggacgatcgagggatatggatatctcaatagaggtcaaggtgaggggtaaaagaggggaggtaggtgtccagggcgtgattcggtgaggaagcaacacctgtctggtctccccgttggccccgaaagaagtagagaacaggtttagcgagtaccgttggactcattcttgtatccttcgcgctcgcgtgcctgttgaagtaaagttagcatatagaaccctgcaattaattcactgctattgaacatacctgggagggctggtattcgccggcctctaggatcttgatcatgcactcatcatctttggttgtgccaaattcattctgaagagcgctctggctagcggtatcaaggaggccttgggctccgtggctgcatccagaggttaatgatctgaccgcaatacaaaagctggaaacacttacgatcgagtcaggaaaatcttccagccgttcagaacatcagtcagaggaatgctgcggtcgttcttccacttcttgaggatgtcaaggtcatcgacgaagacaatgaagtcgtccgagctacccttgtagaagatcttggaggcagtttcgtttccacgagccattttgaatgatgtaaaacttgagttttggatagattgaagagatctgaagatattcgaaggtatttgaagagatagagggaaaatgttgagtgaagagaggatcaaaaggtaaaaggccggtggtttaatagcaagagatgatgactggtgacgtcatacaatgagctgatgcaaacaaaaaaagaagctgctcgcatgtttcctcttcatctacatggggcaggtctcaaactgtacaattatacaactaaaatcacagtggatatgcttatgtgtcatttgttgtcttagttcctcactttactacaattctttacaaggtgagttgccaactattgcagcagtcgacgtcatagtagctcccccctgcccactgtaggatccgctgtgacgccaaacgtggggataatcctcaatgaagtggcaaaggttggagaatctgcttgcattccaattaatgattaattatagtggcccaaagccacaattacgttttcgggttaattataatctccccttgactccaagctcctcccgaatgtcccagatcccaaaacgataacacttgccccggctatgtaacaatagggccttcactcagcatgagagcggggcttttttgacttcttggatgccaacgcactaaataaattctttggagacgaccacttctgtggagacgaccatttcttggaagatggagatatctcgggacttccatcctgactccgtctcttgtcgctaaggggcgaggaaacagacgatgcgggattcttgggtgaacctttgaaaaggaatgtcttggaccgccgaggcgtggtgggtgtccgaggcgactcacactcgatctccttgtcctcccctatatcgctgctgcctgctgcttccttgtccattccctcattctgctcctcggggcgtatctcggttgatcctgcttttgaatggaaggtgctgacggaggtcgaccgtctagtgatccccgggcgaagggtgagccgtctcatgattggaccacgtcggaataggtcaccccttccaagaaccattcctgggaatggaaggaggtctgcagtgtagacatctgagatcagtcgctccagccggattcggtcaatccggcgagcagtcaatgtcaatgcagagcgatcaacaggtgtcttaggccgttcaatctcgccttcagtctgcatgactggttcttcggtatggcgtgggtagtgcgttttcttgatgaccacatgttggacgcggaacttgcgggagatcgtcactgaatccatcgatgatctgcgcgccatagaagacactgtgtactgaacttggtcaagaggcaacaatggaagagccaagaaagaatgtttccttggctcccacgtcctgggctgggccgtttcggccaaagcggccgatactttgagaatatcggtattccattgcttttcttccgctgccgatgatgcactgagaacaaattcgtagttctcatcttggttctcgaacaggagcttccacgaaaatatacatccatatggacaaagtcctggtgagttagatgtatactttgagcataagtctcagcgaaaggctactcacctcgtccattttgaagcgtatcaatcttgagactagttagacagacacaggccactgcttccagtcgacgctggtcatcgattcccttggcaaagagaaggtagcgttggaacagcacacagaccatgaactccccgctggtggtgtccgccgtttgatatgtgacatgcagtacaccgcacaggaccaacgggcctaggtctttatatatactctggagtgcgtactgcccaacacgttcagtcacgtcatctcattaacgaagatcttgtgttgcctaccgatttcgagatatccaccttaccctggagaataattgttttctggatgcgatctttgttgaccgggtttccagtgaccgaattgatctgtgttaccagcccccgtattgtgtccaaaacttcctcgattccgtaatgggaagacgggcaatcactgacaggggtagatctgagcagatcttgtagtacgagggggtatttgcaaagacgttggatgggctatcttcttgttagtggtcgaaaacaccccggcttaactcacgcacctttatcaacaaatcattcaatgtcattgatttgttgtcctcttgtctgcgtcgctcagtggacgcgaccgacttggaaagagcctcgatcccttgatcatatattgtccagttggcaattgaccggcgcaagagagcaacgtcttgtgtcaatagttcatagttgctgcagaatttgttgtatatggggaacgaaagtgactatgaaatggccagtcagtgcatatagtcttattcggtatgccaatacttactaatttcccaagttcacgtgcaacttctagtccctctgctggttcagcagtgagtgccatcaggcgttggttgaccgatgccttgagtgatcgagtccttaaggaacgttgctgaagtccctttaggctgcccagatcaagactgcctatacgcttggtgatccctcgagacataagctcagaggcgcctgcctgttgagcctgaggtgctgacaagggagatgccgtctgaagctgggtcaaaaaccgttcatgtattccaaggatctcctggatgttgtcatagatttcgggcctcgtgtcaaagatcgtaaggatctgtaagtttatagagcacatcagcatcagactgagggacgaaaattagctcaatggcttacccctataagagccttcagaccaagtacataatcagcctcggtctcgacaagctcctgtaggatatggcgccgtctggtggcccgtgtttccgcagcctcatcagcttggtgacttgaggttggcctggagctgtcaccagaatggcgcacatccgacagcgtgctctggtttgttgcgctttggatggttgtcctagatcttatcaaactctggcttccgatgcttgctgtggttgttttgacggttccgaggtgcgatgagtcggatgcacttgaccggtgaccttgcgagccatgagaagatgaatctgaccagccctccacgtgccgccgggaggtagaagactcgcttttccgtcctcgaaagctgtccatccatttcttgaatggacgaggagtcgtcttatcgctcggggtcactccgccgctgctctcgaacttctcttcggattcatgatccagcagggcttgtttctcgatcattgcttcttcttggtccgccatggttgcaagtagcgatcccgcccaataaaatataagactcaggttccgagggcatggagaaagaagaggcggacctaaccgactcctcaaaacaagggaatcgaacttcatggcgagggaagagcaacggggagtgcctgcctcgtctacatctccgacgttggaaagtgcatgtataagaaacagggggaaactgccactatccaggcagtacagagtagagattgcgaatttgaatctcatccatgtacgtcatgaggtaaggcagcgggatagctggaatcaaaataacacattttatatttcatgctctgccaaatgaatgagattttcctattgtaaaaaatattagtacataatgtcctaaaagcgaagtgtttaacaaaaacttgaggccaaagtcgtatacttcgagcgccaagcatcgccgcttatataaaatagtgggagctccagggctgcccatgtgccaccccagacccacctgtccttcttctctcactttcattctttactcaggaaatcatcatggacgataacattcatgctccaaccgttgcctctggaccggcatccgggcccactccccgcgatctgtccaagttgtcgatgccggatctgatgcaggagaaagaacgcatcgaggcggaactgtcagctctcagtagcgtcctcgagtcggtgagatctcagatccaggagttcctgtgacagttgctgacaagacctttcttttcagcatggagtacgcatgacttcatctctcacaaccttcgacggcttcccccgtgatgatatcgacatcgcgcaaggtacgcccctgccacacctagtcgattaggatatatcgctaaaagggaaatatagttcgcacaacgcgagtgcgcattatccacctacgaaacgaccacaaggaggtgatgaaacttctcgagaagggcatccacgcacatttcgccaacctacaaaatgctcaaggcgctggcccaactatgaatggcacaagcgtcccggctgttgcgcagtcgccgaccaataacactgcgttggggacaccgtttgccaaggtcaatagtgtggtttcgggaagtccagcagagcaggcgggactgaaagctggcgatgcaattcgaagttttgggcatgtcaattggctaaaccacgagcgcctctcaaaggttgcccaagtcgttcaagaaaatgaaggggtacgttcggttctctgcccctctgtcaaaattcctatatgtctgactcctctctttctctacagcgcgcagtgtcggtcaaagtctgtcggaaggatggaactgacaccgcaacggagttggacctccagctcacccctcgacaaaattggggcggccgtggcctgctaggatgtcacttggttcccttataaggggacatttccacccatagcctggttctgctaccactgtgtacattgacgatatgtactgatcatgactaatgcgagacgccttttctgtctttctttttccaaaatacttgggttcctgtaaagacaaagggggaaatcatatgcatctcaaacggcgttgaagataactcggcaggcgaagacctaaccacgtgaatttaaatttactccaatacgcgatatgaaaacgaatacaagtaaagctcttcattaacatagaccctgcatttgtagtaaaaatttgccattcaaaagcctcagatggaccgatatgtttgcgccatgttgacactacgtcagatacgcctcaggcataaatacacgtgacccgcagcgacggggcaaaaattccatccagcgctattaattcattccccttctttcacccctcccttctatcaacaacccgcccccatccttacggcgcgaaatcttgaatctttttttattttcaagcttctctctaatcgattttcactatggctgctgagactcccacattcaagctcgtcctggtcggtgacggtggtactggaaaggtaagcgcattcgagcctcgatatgtgatcgttgatgaggatgggctcagagtggcagccatctgctcggctatggtcacctcatgaacttcatgagcacactgagctgctctttcgtgactaccctctgcgcccgcgcctgtcgacattactcaatatctgcccaaccgccccgcctcaccgcgacttcattactaacacagtgaatcccaacagaccactttcgtcaagcgccacctgactggtgaattcgagaagaagtacatcgccacccttggtgtcgaggtgcaccccctcaacttcaacaccgtatgctacctaccccgccgaagaaccccgcttcgaaccgtgccatggtgtgatcgtttcaactaacccgacctgcacagaactacggtgctatccagttcgatgtctgggataccgctggtcaggagaagttcggtggtctccgtgatggttactacatcaacggccagtgtggtatcatcatgttcgatgtcacttcccgtatcacctacaagaacgtccccaactggcaccgtgagtgatttctctttgtagtgaaccgaccgaggtcattttttgctaaccgaaccctaggtgacctcgtccgtgtctgtgagaacatccccatcgtcctcaccggtaacaaggtcgacgtgaaggagcgcaaggtcaaggccaagaccatcaccttccaccgcaagaagaacctgcagtactacgacatttccgccaagtccaactacaacttcgagaagcccttcctttggctcgctcgcaagcttgttggcaacccccagctcgtacgtcattttgtggcttgattcgaaaacacgagtcgattgatactgacctcctatcttttaggacttcgttgccggaattgccctcgctccccccgaggttaccgttgacgagaagcagctcgaggcttaccgcaaggagatggaggaggccgccaaccagcccctccccgacgaggacgatgccgacctgtaaatcggtgcgttcaacgacgggtccacgaagtttccgaaacgaaagttgggagtcgttctcccctgttcttccccacgttctccgattcctatctcacaacgcgtgggagacaggaagtatacgactcccggggattgccatttttttttagtttgggttttgcagtgcaaaagcaaagtctgttctccgaaatcacgatacaatgaaagcggatgggggatagtcgtggtttgaagacatgcattttttttttccctttttgatttcctccaaccttagtagcttagacatcccaattgtcctttttccccccgaaatgagcacagcatcaaaaaaggcatgtcctctttcaacaagatttaaaaaattttcttaactctgaatatctattcaccctcaaaatagtacatttagatctgagcatctcgtcgagttgaatactagaactacttgaatcacgagttatcagagaaaatcaagttcaggaaaaacaacatcattaaggctggctttcagacattattgaatagcacaacgcctcttccacgagaaaagagaacaacgccagggtatagcaatcattggcccccaagaaagacaaaaaagggaataactgatttccacgccacccatcacttggatatggcagaacaatgaaatagcaatcgtatcatcggactatctccagtcctttgagattgagattatccggcaaacaggacaatgtaatgatccttgattacaagtccctcacaccctgtgtaatagatgagttagcaaggggtccggtaaaagtagacaacgagaaaagagacggatgtgaaaacatacaaagagataagcaagttccctcgcatccagccgggagacattcatagtaccaccctcatcgagagcaccactaatcagctcacgcttctggtcctggagagtaacaatgcgatcctcaacagtattctcaataagcagacggtgaacgaagacattcctaacctgcccgatgcgatgggcacgatcaacagcctggtcttcgatgtacgggttccagaaaggatcgaacatgatgacatgcgaggcggcgacgaggttcaggcctgagttaccggccttaagggagacgagcatgatcttgcaagatgggtcgttagtgaaagccgtcacggccgcgttgcgttctttcaggttcatgctgccgtcgaagcgggtgtggttccagccgcggcgggcgaggggcacttcgagaagatccaagagggaggtgaactggctgaaaatgatggttttctcctctaagccgcggtcttcattggcttggaggatctctagcgtctttgtgatttttgtgctggggaaccagcccttctcgaggcgacgtatgtatttcttcttctcggccttgttcttcaaggcgtcctttcgcagctcggctagagacttcgacttcgacttcttctttgattccgcgtcgtcctcttcagtggggctatcggaatcatactcatcactgctcgctgttgcttctgggtcttcgtcctcattggctccgttgatatcaccggctccggcggaagattcgggcattgagctcgggtcatgaacttgcttgaacgaattggtgtcagtgagcttcgcagggtccacaggtcctcggcaattctggcacttgatcacagttggaccatcgtcttcgaggttgatggctccatttgcagctgcagagtcggaaatccggatccagcactccgagcacacgtggtgtccacatggaatgtagatagtcgcgttgatgacactgtccatgcagacagggcaagtgccgtcctcttcgtcatcattttctttgatacgttgcactacagcagcgctcagaagcttggcgttggcgatcttatccacccctggaatagacggggaaggttcgttccggaactcctgcatgaggagtggatggcagcatgcctgccgaagacggagaaggagaactagaacatggctgtagttcctacccagcgtcccagagtcgaggtatcgggtgatctgcctttgagtggacgtattgagctcctcataaacctggctttccctctgatcaaacacaacatggaccttctcagtgacctttggtgggagctgcaagatgggctcgccatcaatcttcgaggtttttgtacgtctgagacagacagacttgaccaggacgcgtagttgcttcatgacatcctctcctccccaaccggatttgatgcgtttcacgaaatcctagattaaacataaatgttagccacccgaagaagcattaatggcgagctatagagaatactgaccgccttgaactttgctgggttgctgtaaggccgaatccggaggaatcccaatagggattggaagtcttcgagacgattcatcatgggtgtaccagtcagacaccagcggtaggtagaattgagtcgacaacatgcctgtgaagacttcgcacttggattcttgatgttctgtgcttcatcgacgataactcggtgccacttggcggcaggattgagagggccggccatatttttcatgtcttggataagggaggcgtctcgcccttcctgtgccaacctttctccctcgagcaatgttttgtagtgcgccgtgatagtaccaaacgtggtaatgacgacatcatactttttgagctccttccatggcctgcgccgttgatggtagattaagacagataattggtgtctccccggtttcacatggcgctgaatttcgagtctccattgatccataagtgccttgggtgcgacaatcaaagtcgggcgtcggtcttcatcttcgaatggacgagcaaccatcagcgcaatcgcttgaatagtcttaccaaggcccatatcatctgcaagaattcctcctttgtgactgctttcttccttggctttcatccatctcaggccaatcttctggtgcttcatcaacgtgactcgaagcgcactcggtgtctcctcgttgtccgctctagttgcctcccgaatgtctttgataccgctgagcaagttcttgatatcttcagggaactctttctcgttgtaggccctacattgaatgagttagaactagaaccagtttctttaagggaaagatgcggaacttacactatgtcagcctcgtcatcgaatatttcgctctggttgcgaaccaggtcaaaggacttgtcgaacttgtcatatgcacccggcattggagcgtatgaaggctcacgcgcccaggggagcactctggaggtcgctgctgatgacattttcgagggactcgatagttgggaaggataaggcatttgaggataaggcatttgagaaggatatggcattcgggaagagcctaccaactgggagggatatggcagttgggagggatatggcatttgggaagagcctatcaactgggagggatacggcagctgggaacgattgaacgcttgtgaggaatatgaggatgtggaatatggcgaagccaagttttgatggttgaaggaactggattggcggactggctgcttgccggatcgagaattgaatgaatcagcagtgatttcttgaatttcatcgtcggaactgaacggggtgagtttattgaatggggctatcggggcatatgtttgaggggtgcgaatggcttttgatgagagaggttcgagttttaccgggtgagtgcggtctggaagatcccatgcattctgctcattgaagccctcgatggggagttgactgtgatcctcatcggcttggagcgcgcgagccagctccgcgtctcgtttcatttgaaactctgtttcaatcaactttgcctgttcatcacactcatcccgaagttcctgtagttgatctgcatcgtcacctgctgcatcgatccattgcttgtacaagcggttattctcggcaagacgggtttcttgctcagcatctatcgcgtcgagtttagatctgcgggattcaggctgcgagggggcaatccttttcgatgatccctgtatcgtgggtgatacctgagatagcggacgctggcgtttacgagaattatctggagaggattgtaaaatcggtgaagctggcaccatcgtcgactggcgagacccggaggcgaaaggcgagggtgcagcagaaggccagtgaggggacgcgaatgaatccccgggaattccagtgaaaccattcgacgccatgcgtggagcagcagctggcgtgcgaactggcggagtgggcgatgacacttgaggtgtcggggcggcttgaggagtaggaacaggatcaccaaggagcgtggcaacctggacttccatttttctgatggtatcacgaagttcatctgcttctgcacaagcaccccgcgtcgagaggagatcatcatagatgtatctgtaggtatcgagatcttcaagaagatctttgattttgtcctcttgggactgatcaaccgcagaggccatggttcaagagcacctggcgttgaccatgtaaccttccaagaccaaagtgtcagaccaaattatcccgactgttgatagcgtggcagagtggtgacggcgatgggtgcgacggctaggacaaaaggcaaagtccaatatcaagagagctagtaggtcaagtggacgcctaggatgaagaataaagtgttctgagagagcgtctgcgaaacttgggttcccatcagcaaacggcaaggcagaaagcgggtggtggcagatggcgcagtgacgaggagaaagaaggcataaaagcaattcatcatgatgcatctctatgccacctagtccgggtatttgcagaggatgcagacttacgtcgagtactattgacgattcaccggggagaatcggtggacgacggagcggattttaggacctcgggagcgaagaaatggcggccgcagaaatgagagagccctcgtttttatagtgcaaaagatccgatggagaaggcacaagagttgatgcgctttgcgaccgttcagctggcccccggggtcgagatgttcaccttgcggggggaagttgaagttctcgcccaagatgtcatcatctatcgcagtgtatagcgaccactaggacatcggtcctgttaacgtttattgccagcagaaaattggccatttaaaaagacatgttaaaagaccctttgaaaaatattagcaagatatctgaaaagaccttaaaaaagagatggaagcaagacgtactaattgaaatatccctagcatcatctcaaacaaggcagatattcagattagatgagtcctttatcggtaaatataaaggccgtatcaacggccaactattctgcttgtatatagataaccagctcaatacaaatctatagaaacctttcatcagggggttgatataacaactcgagtactctatatccatggatgtatgtatgtatgtatgtattaactacctaggtatgtacacagtgttaaaattacttcaaataaggcggagatatgagcggtgaattgctaagagccaatgagaccaaagtcagctgtggccgctatccaccgcagtaggctgccaacattgctggttccacgagaggtcttttacttgagcctctttcagacagggtggttatattcattgtgatatgtcctacataagtattgaggtcctgcagaaaaggctttctagtgatgagacatagatagttagaagtatgaaggtaactacacctttccctgcgtcgctgcacaacctttcattgacaggaacgcgctcttatcaacacgtgaccaggcgcgtcacgcgccaaacaggccaaacgcagggctagatggcacttgccctactatcccaattgggcactcgacacctgagacctctagttctagtttcggccatctcggaggagaagattcaacgtttcgatcacgactgtgagacgttgcgatgagtcatatcgtgcctgggctggaggaggaattgtcgaatcgcatgctataaggcaagtaggagtacaaaattcgacgtacagctcgggctacatctggtccgatatctagaccaggggaaatagttatctcttacatgtagctgaaacgtaaaccaggagaataaacggtgtgtattgttctatgtaaggtttggaaatagggaattttgtataaattggtttgctgcaattgatcacttgggagaataattccatcaccaaccatctacgtgtagtgctcatctttaaatcaagtcagccactacctcgagtgttatgtatatgcaaaggaattctgccgaacgggcggccatggtatcagaacagcggctagttcgactttggaagacgaagcgcatccaagaagtcctcacgagccatctagcgagcaaggatctcatctcatgccgtctagtatgccgcaggctcgctgcctatctcgcaccagtcctattcgcggatattgaagtccgttttcgcagcagcacctttgacaagccatcacggatggcagctctggagcgcgttggggtacacatccaagccatgacgtttaaaatctcacatgatagggagacattcttacctccaatcctggatccaatcacggggacagaacaaacgtttatctacacgccacaacggtgccaacttggtggcagtagcccaaggtatggcagccggcaaatgacagagctgctagtcaagcagtatccgcctctgttccatgcatctaccaacatcccgtcatttgtccaggcattgacgatgatgagcggcttgcaacatctgcgaatctcctgcgagggccaagtaccaagccatcgctatcgccggagtgtagtagattatgcattgatctcattgcgaatggcaatcgaacaagcaccattgaaagatttccacactctgtcattattgtcagtccacccaggagcagtcctttatctgggaccagctccaggatttggtgcttcacctgcatctcgcaagcgttggtcgcaggtccgcaagctcacagtccagatgtcgagtttcggccatgagccaggtcaaccgacggaccacctcaagctccttcacgcgtacctaggaagctttccatctctacaaagactggtctttcattgggaaggcgagaggggcctctcacccctgtcgcttgcaacagagtcgagcctgagcagcacggcgaaagggaagccaactcaagcctaccctcagaggtgcgcattacccttacggccattgaagttccaacatcttcaacagatggagctggtcaatgcaacaatggacgcgtcgcaagtggcgtctttcatccaggagcaccggagttccctacgcgagttcaacttcgaaaacgtgatgctccgcagcggcaattgggacgatgcgctcgcgccgttgacacgactcagcgggagtgagagatggaagcagggtcggcgcgacgccgacaccatggatgtgccgatcgtattgagtccagcgggagtcagccagaaacagttacagaaggtaatttgtgctttgcagcaatacaaaagtccaagaacactgcgaagcttggccaaagcgggatcgcggacacgcgagttgctgtgggagagcccggatcatatgaagcgattgctgcggtcttcggtgtttagttggcggtgacgtcaaaggtaaggggttcgtaaagttttcttccgaggaaggattggcataggctagggctaatgactgtagtactgtcgctgtgaataccgcatttgtgcaactctcaagtcgcaatgcaacataagcgcggttcgtgtggagtcggggggaaattcctgggggtgaaccgtcaacacggagaagactgggagaaaggaccaaggctttgaatggcaagagaaatgaagatcctagtccagtccaggaagaatctcagagaatcaagaacagaaaagacggaaagggagaatcacagacactgagcttccctcggtgtggggaaagtgtgggttgcgggcctcggcacgtgtggtcagttcacatgcacttggcagattgtcatttatattcggtcacccgccttggtgacttaccatcacctttgtactaccatcttcacatattcaccatgtctctcaagaagggtatgcgtctttcccctgactcgaccagtcagaagctaatgaaaatagattcccacccctcgtccgctgccttcgacgtcatcaaccagacgctccaggccaacgaagccgaccgcaaggatgccctaggcaaggccaaagccatcttcgccttcaacctgaagaactccagtggtgaggaggctgcttggtaccttgacctcaagaacaagggcgaggttggtcagggttctgcccctgctggcgacaaggcggatggtgagtctacattcctggtctggtctgcgcgcgttggtgtgcaatgtgtttttttcttgcacatgctaatttatctccctcaatagtgaccctctccctctccgatagcgactttgcccagctcgtttccggcaaggccaacgctcagcgtttgttcatgggcggcaagctgaagatcaagggtaacattatgaaggcgaccaagatggagcctatcctgaagaaggcccagggcggtgccaagctgtgaagattagatacccttttgaaaaattatatacgaagtcccttatctactagggcgtttattttcggcttttcactttcgggatattttgattgttcaacttcaaataatcttaatatgtagcaatgaccgcgagcatcgctggttcggattgatgaatgccaactctacatgtcccgcacatgtccctgtctagatactcgcccctggtccaaaaccacgaagtaatccgcatccttgaccgcttctacgcgatgcgcaatcgtaatgacagtagactgctgcaactcctcccggataatctgctgaatttcaagagaagtctcgtgatcaacggaagcagtcgcctcgtcgagaatgacaatcgcgcttcgacgaaggacagcccgtgtgagagcgataagttgccgttgaccctggctaagatttcttcctccagcctcaatatgtgttccaaggtgccaaccgtgccgactacacagacgccccaggacttcggtgcatagctcatcggaataatcttccgttggatctaggttgagtctgatgctaccggggaagaggacgggatcttgagcgacgaaggtcactcgggtgcgtaatgcttgtgtgctgacgtcggcaatattgatgccgtcgataagaatgcgaccaaattcaggtctgatgacgctcagaagggacattgccaatgtggacttgccgctgccagtacggccgataaccgctgtagtggatcccccagggatgcgaatcgagacgtttacaagtgagggatcgagatgcggtgcgtaacggagagttgcatcttcgaagacaacgtcgctgccataagttggccacgcggctgggggagcgatggtcccgggagtttcttcttcgatgtgcagtagctcgtcgactcgctctactgacacgaagtccatttgaagttggccatactgcttgcacagtgtatgcgtggaatcgacgaagttgttggcagcaataagcacgaatgccaccagtcctggtgtggtattggtgtacaacgccagagctgttagacaaaatgttgagcaagcagacaggccctcaaatcggtacatgagccagctttggagagaccagtagaaatggtccattccctggaacttgtcaaccacggatatgacccggttctggaactgtgactctgcatggaaagctcggacggtggtcaggccgtgcaatagttcgccgaagttggacaacagaggacttaatgacaccatttcgagtcgtcgtaggctttgagatgtgggaaggaaacgcaggaataccaagacaaacaccactgtgagagctagggagaataacaaaaacactggggtagcggtggcaattaccaggacagaagagatccatgtgatggcttggaatgcaatcacctggaattgctcactaatgttgccatccacgaccccaatatcggatgtgagacggttcatcaagcggccaagagggatcgtatctgacgaatgattggttagctttgtcctgttgagtcaagccatagaacttacccaagtatcggaacgttgcatggctaacccggaccaatacccgtcggaacaaggactgcccagcataatagacgatgaccagcatcagaagctgagcgacaaggagtgtggccgcttgaaaagagatgatagcaaaaaacgtccatagccagggtcgcacatcctcgcgcggagacggtaattggcctacggagctcggaggcccaaagtacatgtccatgctcaagtttgagactgaccatacatcttgtgatggcctctcactccactttggaagagttgtctgctcataggcttctccccacccttttaggaaccacgattgaccaacagccaacagtctgtagattgccaggacaaggacgagggtgagccaccatcggtactttccggccttgacataattccagtagactcgagccttaacacccccgtctgctcgatgctcctcctcgatgaatttatcaggcacggcagctgtctcctcaagtgtggtttctgcttctgttccgtcttcatgggcgatgacttgcaaggaggactcagtcgcgtcaagcttaatgctatccttgtcataaacagtagcatgctttccacaaatatcgattatttgatccgcacgttgtcgaaccaacgtagttcgatgtgtcactagaacgatagttcggtctttcatcaacggccccgaaaagcatcttcggactatgagctccgcggtattgtgatctaacgcagacaagggatcatccaaaagcagaacccgcgatgcgctgtagacagctcttgccagagctactcgcgctttttggccacctgataaaccaatgccattttcacccacaaacgataaatcgccatgtttgaattgagcaagatctggaagcaaggcgcaggcttccaacgtccgtttgtagcgctggtcatggtagggagcggagaatagaatgttatcacgaatactcatgctttgcagccacggggtctgcgcacaatatcccaccatttcgtttggaatatggaccgagccgttaagtctatcgagttcccccaaaagagcttgcagaaatgccgtttttccagcaccgaccttgccggtgacgacagtcagtcctttgggaatggtaatattgatatcaacaaggacgggtgagaccttccctggccatgcgaacgaacacgagtgcatcgagagtggagcatcgttcgccaggggttcagagggcacattctctttgtcgggttcggacatgaaatcctcgatacgcccaagggcaatgaaggcattgataagtgatgtaataagaccagggatatccctaagacgggtctctagcatggtaaacaactgcaatgcgggaaagataatatcaactcgcagctcatgcccggccaaagaggtgtatgcgtacaacgcaaccactggaaacacgccacttgcaaaagcgttgataaagcgaatcaagatactccatagactagtcacaattcgaatattcaactcatgctgtcgggcctccattacctgctgaagccaatgattctgccacccgtaccaccgcaggtgacggatagcttctacgaattgcgaagttatttggagtcttgtatccgttgccactcgtctgactcgctcccaacggagaagagctctagttaccagggcgttcacgatctgcgcaaccagaacggctaatattcccaggaaacaagatggcccgaagagtgtccagacaaggaaggtagcgatcacgagtcctagtggcttgtcaatcaacgagtcgacctcccagaacctctgtgcaacttcataaacatctccgcgcaagagattaaagatttttccaagtgacgcagcttctttagcgtgtttttgtggggcctttctgttgtaagtaacgatacgttgccagaaaccttccgcgggtttggctggaggctgatggctctcttcaactggggtttcatgattgacgccatttgcttccgcgtcagatggtcctgggttgccctcgatcatcagcccagatatgttcttccgtgaaagggctttttcatagaccatcattatcatttcacccctcgaccgctcatagcatcgccgtccgtaccacagaagtaacacctgagactgtgcagcgacaagtcggagagcgaaggacatgaaagcataggtcaaaggtacacgttttggtctggacgggtccttcatggcctgcaatagttgctgcaatagtacaggagtagaaaagtctatgaatattattagtgatatataacaaaataacgtccgaatttccataccgcatatcatctgaacaagcgagacggtagagatgataaaaacatcaattccattggctctcagtagtcgactaaggacagagccacgaagtcgacgaaacttttcatgtagccggctgtgttgaaagtcaaatccaagcagccaaacatcttgttcatgtagttgtcttttgcgcccaagtgagataagcggtgccatccacgacactgtgaggaactgccaaagcctcacattatcttctggggtgcgaaagtcattagatggctgctgaccaacagcgctgatatctattgaagacagtgaagactcgcggaatggcattaggatgattgttgcacaggctgctgctgctgccgatgcggcaatgtagcgagcaacaattttgaatttcggacattcatctgggtgagtagccaaagaaagctcaattgcaaacgctaagatatagtacgcgagcatcgagatagaacatgacctgggccgtttcagtgctaccagaatagatgctgtggcctaaggaagatgtgagtagctgatatcccgtagcttgtacccccagagacggggagaactgacccatgagagaacaagcacaaaagccgacggatcaattctcggaggaacgaattgaaccgtgtcgactagaagtccagtgaccgaaaatataagaagagagacagtccatcgcaatgattgcttgggctgatctagcgggagctctccggtctcatgttgctcagaaacaaaaggaatagtccacttggggcgccaccggtgaaaaaagtatccaagtatatggcttaatgcaataagcaatactacgatagccgggatggatgccaggtagggcaatgcacaaggtgatagccacgcattatgcgagtcctggattggtcagccggtgcgagccgaaacaaggggcccatgagttcatacccagaactggtcacactgtggtctggatataccctggcccagcggaatttgattcatgcttggtcccaagagcagtgccagctcttcgcggtagctcggggtgacatcccttcgtgaagcaacgtggggctggatcaatattcatccgcttggcccgtgccatctatacaggttggtcagaattggtacttggtccctgtttgacatcacatagagagttaacaaaccgtgtgcctgtttcaatgtgcaattatagctgctgtcttgcaggaaaacatggcgtcgactttcagacccaacggcttcaacggctgcgccgatcatctggcgggatctctggcgggatcatccgccacggggccgcccattgaatagagtccggatgaaccttggcgttacaaagtcaggcagctgcaactaagtaaaagtttgctaagaaaaacaaaggatcaatgataacggatctctctgatccctctggcgtgtggtactgatctcatgattgaaacgaggcaggcgacgtatcctgtctcagaacaggaagtgcgaaatcgagaccgctacatagcccgcctgagaactcgtgttttactgtgcaataatataatgatcccgtgaatctcctgcatcaaagagccgtccacggcaaatcgctcgatactctgtatcgcgttcttctgcagaccatcaatatccggtaccaaatgcgctaaagcaggacaaacggagcctagagtcaggagaagaacagaagaaaacatcctaagagattgaaaaatgagtccaattcgagtatgcagtgtattgtgaacgtacgtatgaataatgatctccgcgcaggatgatgggcccatcagtcgccgctctgaggcatccagatacgcccggcaattgactatacttgcctcgcactgtttgagcaccataggtggaacatcgttctcaggtgaggagtcaattgcacaaagaagaaatggtctggttatgatatccttggcggaatggaagcggtggagcatattgagtttagggccagtacaacgagacgggtcgttgatatctggtttaattgtgcgcggtaaaaggccaaaccaattgtcgagctgtcgatctagttcttgagaaacattcaggattgtagacagtgactggaagtcatacgacgggctgtcgcttgaagctggctgcagaccgaggctgcgccttgtccagtcacttccgtacatggtgtgatgtactctgttgagcagacggcggacggacaattcggcaaggaatacgtgtgtttcctgggcatcatgatttggaaaggttgggaaaggagtcagatcaattacatgttcgataccacttcgcggtaaatgatgttcagctatcagatcactgccgtcaatgtcagcataaaagtggtagtccatatttgagtttggaaacaaaccactctgtatcaaacgctgcccatgatagtagaatgatactggacttgagctcatgattatctggagaagcttgacttctatccccaacagacacctgatcaattcacttgaaatcaaagagtaaacagagagcattgactaaccggctgttcaaatactggatactcgtagaagccatatggatcagcttccatgattggagggggcgtaaaagaaacccaaaatatttcgaaatgagtatcaaactctgcggaagagtgatggtggggcaaaaggacagtaaatattcgttcatcaatatctgcaatgcaggtgaaatgaaatctgctccaggtacccagtatggagagctggactttgtcgggtcaacttgctcaagagctgcagatcctaatgcaagaactgcaaggcatagtgcagaatcacagtcaacactcagaccggctctagcatggtggtcataaagccccaaaaattggtctttgtcaaggattggcatctcaacatggacgtgtctgaaatatgcctccaccagtggataagtgctcgcttcatcgagtaatggcaactgactcgctgtaattgtacctgggacaaaagatagctggtgtggcatatgtctttttgattccgcgcgtatgaacaggtctggtggaaactccccaaagagcgtttttactttgttcatatgtagcatatattcggttgttgttgtgtggccaataggaatgctcataggcgggatttcatgttcaggtggtatgaatgaagatgaattagtgctgataatctgggagatatctgccgggttgggtctcgacggggacgaaattaacatggtggacggatgagagaagtccgctctttcatgctcagacgacgatggaaatgcaaaaccaccgcttctcgtttcgccagtctggggtgtttgagggagcctcgggtgactccataggaagttctcaattgcatcaaggcggcggaagaactccgaagacgaagtctctcgagggctgtcggagtttagcaacgtcgctgaggtgttgaataagatgggtctcttaccccaaagaatcaacttcgttgtagacacattcaacacctgaattctcgcagaggccgcaggagggtatcgcaccattgcagcggcgtttcctgctcgttcgtcagcatggggaaactcagtcatcggaataaggggaacataccgcctccgacaataattgcatgccaaagaagcacgcttacgactgttttccatgtggtaaaattatatcgatttcatgggtcaaagccacatagatgaaccgtgttgatgctgatgttgatacaaggcgggaaactccgcatgggcccgcttttgtcccgccttagtcatcaacaatcccgcggagcagcccgcgagtcctcagagttgacaatgtacgcagtagatgaaagatatttaaccaactccagcccctccaacgttgctttccgttctcatatctctgattctttttgagaaggtctcatcctgagccggtactctcaattgacacattgcccgacatggaagcccccctccaaatacgaaccgggcgactttaaaacacgcaccaaggctgtttacgacctttgtttgatttgatcatttccacactgtatatacgatctcacacaaacacccaactaggatattctttgttaaagtcatcgcttaaaattccattactatatctgaagccgtaaacatggccgcattcggcaatgaaattgtatcgggccgatcaaagcttcgggaaactctcggctccacctcagttccccggggcgctttcagagattttctgttgggcttggccggggttacccgatcctttttagtctttgacacatactattgggactatcagttttgccaattcggggtcaagccttgatttgagtcgcgtcaaattcactatgtttgacgaaaagcatgccgcggacggcaaggtcgatggaccgctcgaaaaagacttggagaacaagttggactcgaagcaattagacgcgaagcaattggagccctttggaaatgaggagacagcggagatcaagtatcggactatgaaatggtggtaagttattattttctacgtaaacattgtgaattcaatcatggacatggctaatcatgcttaaacaggcactgcggaatgcgtgagtagctaaatttgagaaacgcacataaaagcttcgactcctgacatccattccagtcatgattgcagagaatgtctctgtcggaattctgtctttgccatccgcagtggctacccttggaatggttccgtatgtatttccttttgacggtttggagaccccatagctaacatttataaacagcgctgctatcatgattctgtttgtctctgccctttcatggtacaccggctatgtcattggccaattcaaacttcgtcatcccgaagttcacagcatgggagacgccggagagatcttgatgggtcctttcggccgtgagctgctaggccttggccagttgctactgttgatcttcctcatggcaagcaacatcttgatgttcaatatcctgatgaatgtattgaccgaccacggtacctgcacgttggtgtttggtgtcgtcggactgattatctgctttttgggcgccttgcctcgtactatggacaaggtctactggatgtccgtcatttgtgagtacattcctcatctactgcagccataacattatcaaactcgaggaactcgactgacctgtacgaagcattcttgagtgtctttgttgcaacagtgttgaccatgatcactgtgggagtcgagagcaaaggacatgtcaagaacgaggccaccacggatgtcagcttccgcgaaggcttcttggcggtgacaaacatcattttcgcttaccgtatgtggaacaccaaatgatgctagtcatcagacctggcagagtaaaccaagctaatccaaggaccgatcttatagtcgcccacgttgcgtactttggcttcatgtccgagacagaagacccccgcacattcaacaagtcactcgccatgcttcaaattgtcgacaccgtcttgtaccttgttagtgcactgctcatctatcactacgtggggccggaaacagccaccagccctggtgtccaatcgcctgccatcctctctctgagcccgttgatgggtaagattgcctggggcatttcgatcccgacggtgagtttatcctcctatttcgcttgtcctctctggccacgttactgattcaatgcagaccattctttccggggttgtcctcggccacgtcgcgtgcaaatacatatacgtgcgtatgttccgtgggtctgacaagatgcaccgccgaagcttcctgtctatcggatcctgggtcgctatctgcctcggagtctgggttattgcctggatcgtggctgaatctatccccgtgttcaacgatctgctgagcctgattgtaagtattctaacaaatctcatttgactgagaacgttggctaatgctgagattacagagtgcggtctttggaagttggttcagctgtaagattgactccccattgtatggtttcttgggatctaaaaagtgctgacttgtgattagtcggactccctgcgatcttctggttctatatgaacaagggccgttatttccagaactggaagaaggctgttttgaccattaccaatattctcgtcttggctattgcttttgctattgtaagtatcctccttgattctgcttatggtggctaatcctttctagtgcggactgggattgtgggtatcaggagtcgcaattcacgaagactccgttaccaaaagttggtcttgcgctaataatgcgtgattggagagcaacgaacctcgaaggaagacgcttctcctcttaaaaaagtatagatacaccgattagacctgcttgactacatactcaggcttcatcatagaccatagatttttaccataatttcatattgcatttcaggctttgcctttttgacggtaacacaagacacaatgcacattcaagccggcgaagggcatatgtcgtgttaatatttacttcatgaaacaaactcctaatctcaggctgtacttggataccagtttacttggcaatctccataatcttcggatcagcccactccgatggaggtcttgatgtctccgctcaggcaatcccccgctttggcggaagcatcccgcctcacagccgcttacccccaacagctgcacgtacttccaaattggattacttcaaactcgccgcttgcagtgatcgcccagggccttcctttttataccccgaatactccaaataccccaagtggtttccacatcttgtcgcatcctcctcgcccagtgtgaactgttttatcccccaatcctgagaaccaacttattacatcaatctctaggtaaacaccgatttgtctaaattaagccttacgggataaatatgtctgccgacacatcagcaggagcaaatgaggaccagcgagcttctctgacttcccgaatcctccctaccatgactttgtcggagagatcaagtccgctcactcgccctctcgccccagtgccttttacatcggctcgtgagcgagcagaagcacgattccaagttcagggcaaagccatagtcaccggcggagcaggagcactaggcctaatatcagcacgggctctcctggagcacggtctttcctcactatgtattatggatctccctaggaccttggagacatcagaagaacaaatccaatctctagcatcgaattttccatctgtcaacataaccaaaatccccttggacgtgacatcaatggagtcaatcgaacccgcatttgagcaggcacacaaagtaatggaaggcatcgacattctctgctgctttgctggtatccctggctgccaaccatccctcacagtaacacccgaccagttcaaccgagtgatagacgtcaatctgaatggatctttcttctgcgcccaggcagcagcaaagcgcatggaatcctcaggcaaaggcggatgtatcttattcactgcgtcgatgtctgcccattataccaattttccacagccgcaggctgcttacaatgcgagcaaggctggagtcgcgcatatgactcgaaacctggctgctgagtgggccgttcatgggatcagagtgaatagtattagccccgggtatatggacaccattcttaacgctggggacagcctggcggacgttaggaagatttgggattcgcgttgtccgatggggcggatgggggatcctgaggagattacgggagctgttgttcttctgtgtagtcagcgtgcaggacggtacatcactggtgctgatattgttattgatggggggactttgactctgtgacaaggtagtgcactagccatcatcaggtcgctgtccgtgtgtctacttgcttctatttccagaaacagtttcagaatggcagtatctctttgagtgctagttcattgtaacgtttatatacaaaagagaccacacaacagcttgtcgcatgtcttcaaacagcccctcttcaccgacaaatgtaacctccatcaatccgcagatccgcaccagtagtgtatgagctagcgtcactagcaaagtacacataggcagccttcaactccttaggatcactttggcgacccataggaatcatattattccaactcttctgtgtctcctcatccacgaagtcacccaaaccagtattgatatatccaggcgaaatactattcacacgagcgaaatctctccactcattggccaacgagcgagccatgtgaatacacccagccttagcaacattatatgaagtctgctcctgggggtagttcacaatatgacccgacatggaagcagtaatcacaaagcttccctttccacgctccttgaaatgcgggccaacggccttggcacagtaaaagaccgagttaaggtccgcctggataatgttctcccagtcttcgaccgaaccgtcgagaacacccgcgtcggcggtacggcccgcgttcgcgatgaacgagtcgatcctgccaaagtcggtgatcacgttcgtgaccagctcttgcacttcgttccatttcgatgtgtcgcatttgtaggccttggcttggataccgtactcctcttgcagggctttggcgtttgcttcggctccctcctgtcgcgagaagtatgtgattgcgatgtttccgcccatttcggcacagccgcgggctgcttcgagaccgattcctcgggagccggatgcgcccgtgacgaccacgaccttgtctttgagactgaataggtccttgagggagcttgcttgggggacttcgataggcatgatgggcgagaaaagggacagaggtgtgttggagatgtgtatagggaagatagaatggattcagaatggttgagacttgtttggaggatcgaggggctgtagaaggatcagtgaagcctttatacccttgatgattgatggatccaacttccccactgcgcaactgcccatatcattctcagtttcctttgcgatgttgttgccctgctccacccggcgggacacgaggcggcacagtcccgccagcgtttcggtggacactttggagtcaacgatctctcgaattattcatttcaatagatgaagtaaatctagaaaatggcaaacgcattaggcgggctagcaacaccaccaataacctagacggtgtctgaattagcatattcccaacacagccaataatcaatagaaccccaccttcaaaggcatactggacaagaaaaagctataacgttcattagccttgcaatgctccgataacttctccaaatcaaacatctccccaataggagttccccaacccgccagcacccactcatgcaaattgaaattcggatccgcatgggcacctctaataggcgcacgctcaaaactcggcgcatcaccggcgacagcagagaattgatgctcccataaccatcgcaccataccctccgtcgcctcaacgccgctaaagtctggagatgatcggagtgccaagtcctttcgctgctggttgtctagtttgttgtatgccgccgtaaaaccgctgcggatgaataaaatgtcacccttttggaagttgaggttgtgatctttgactactcgtttcaggttatcgagggtaatggcctcggattcgagggcggagatggtgattgagtttgtggtggcccattctgcgtagtcgaggaggacgccacggcctgttattccaccgtgttcgcatatggctagatgagaggtttcgattagcgcttggctaattggtatcctagagctggttcatacagtgaatgctaatagtatccgagctctctatcgcttccgtggtatgtccgttatagaactgcctggacttctggtttgctaggaccgtcaaccggtaagcaatgatctcgaactcatcatagacgctctacaacataccgtaatgtctgaacccatcccattgggtagatccctggctattgaatgtcaagatgtcatcataaacacaatttggattccgaagaacaatctcctgcttaaatggatggcgattgaagctaggatgcgaaggcatgctcaacggccagtcgagcgatattcgcacaccagtccagatttccttcgcagcttcaacgacccgctcgggtgtgagcaggttcagcgttccaagttggtcatcctttccaaatcgaccccaggcatttcctcgtgggcctgctgggtctagtggaagggaatcgaacgagattactgcgtcgtcatctggttttgccatggtttggggttgagagtaaaatatggcctggatccttagttatgtgctctttttcccggggcacccctcagaggctccatatctccatatatcccccgcacgcggatatgaatccgagcggcaatgcaatttcccggggctttgaggtatttgggcttttttgggatgtaaacatttcatacctaaaggatgtctctgtgcagtctgagcatttacctacctaggtagtttgttgcgtttgtcattctcggaggcttcatattcatatacagcttcctttccatatattcatatcacaccgttcttcctgcttcatccccctggtagcatctagccttaagaggttatgagcccttgctctccccgagcacatttttattgtcagcttcagcagtaggggtagcgaggctaaatgcctcctaccctagcaccgctagcaccttaccggaagcctatatagggcgatactatctaacagtatctatcaaagtccattagggtttattagtgttagcctttaaaagctgcaacaagcttctctctacacggagcctcgttagcgaattttctagtacagaatagcaaaaggctctatctctcacttcttagagaatagtaaaaggctatatctcacttctttagtaaattctaaacccgcctatatacgagaaaaatttaaatcggtatttaataggtgtcccttattaagaattctctttatcttgatctttatctttattttaactagctaaaagctgtcttgatcttttatcttcgctttttgatcagctacagtagctgaatactcttcctaacatattaccttacagctaaaacggtttactataggaaccagagtgatttatttttttgatatggattcatactttctatgatgttttttgatgcttagtctgtggggggggnnnnnnnnnnnnnnnnnnnnnnnnnnnnnnnnnnnnnnnnnnnnnnnnnnnnnnnnnnnnnnnnnnnnnnnnnnnnnnnnnnnnnnnnnnnnnnnnnnnncccccccccagcagccgggcgcccgctagcatctagcctcaggagaatcacgcggggatcttagagcgcctaggtacccacgatttacgtcaaggggcggcgagagatgtcgcccacttacctctagccaagccggctatcaacagtgagaaggtgacagcgtcccttctcgaccattcgcgtcgagtgacagacgtcggggtgacggaagattatatggggggtccaggaagacttctggaccctccgtgctataaacaaaccggttcgagatctacgggcacagagtcgtgccgaagtccctttcataccagaaaggctacaacctcaagaagtgtcaagttttatgatacaaaatggcatggatattggttgtttataccaacggtcagttacgcgttataggatccaccaactccgacgtgggcagtgggctgaccagcaaaagaatagcgagatccttggtgttgcttatcctacaaactccgctggaaaaggccgtaacatcgatccgactcttcaaagcatcgatccaattctttagagcatcgacaccacacctgagagcatcgacccgattaccctagatgagcactgtgaatttggacggcgatacagaggccgaggactccaacgaccaagacgaccccgtcgacgacgcatacatggcccagatgctaggcatcgaatgcaataccagagacgctgatccggatataatatatatgatcgtataatgcgcgaagcccttcgggaagcgctactcaatacgacaatacctacgatgaattcatcatttaagcaaggaggaagcaggcaagcttgcacctgcgaggcctggagggtatgagaaacgtgagccggcagctatatgcccacatgacggttgtactgtgagttttactcagtctcttaaagtccctcggcacctccgcaccgttcatcatctaagcgaggaggagattaaggagcatgtacctacacggcgtgatttgctcaggaaccgtgtctggtgcccggtctatggttgtactttggactctactccgaatagtcttagtcttaatactaggacgctcgttgcacacctacgaaacgtccatggactcaacaaggaagaggtgaaacgtcttgtcccacacgtaaaagatcacgatctcgctggttttgcacgtttttcgtcaaattatcggatgagtgggtctacgtaattaccaagttcttgccaataaagctacgtccgcggtatggaggatggacttcacgcaaaacggagtttaaagtatgagaactatggtactctagaaggtgaagtacgcaatagtagcagcgtacgtagccagattgtcgccaaccgtggccaatgcagtaccatccttcacaatcatataactagtccccacagtgtttagcccatataccacaagtccacttgtactgccctcggtgctgaaaatcatgctttggcaattctccgggagggggaatgtggagcaactggtgctgtagttattgaagaagctgtatagcccagccccgtagataatcacatccttggtattgagaatccgcagaccaagggagttgcagttcccgccgagacagctactatagtcggggtcactgagagccaaattcctaggatatggaccgttggctgcgttgggatttggctgatagtatctgggtgcatttggttaggacagaagatgaaagatacaaggatatcatgtatgggaccacttacggagtttccgtctgcacgaacccagcgcaaatggagcttgcacctgagaattgatactgatacagcgagtgatgctcggaccctgttccgtatcttgcgccagtgttagtgagagagcacgcacgggatctctgtcacttacagccagatattctttccttctactaaaaggccacggccagaatacaccgagatctgggtattggttggactttcaaggtcatgatcggcagtccaaagccagacattctccaagtaaacaccactggcggctttggtgatgtgcatggacatgtaagcaacttgacaggctgctgagacagctgctgtcgtcgggcactgagcgacctgctgctgagatccttggaaacccccaattctagtgtgaacatcccacattccagaacctgatgtcgccgccaagttccactcaatgagtacagctcccggcgcggagcccgaggtgctcactatcatgtcggaccattcaatggacccggattctccagatctgccaatttgaaccacagggacaggcttggtaatactcgaccatacactgccagtggccatgatgacagaatatgcctcgccgacaatccgagatcccggcggaatgtaaatagtgttcgtgactttgtacgtgccttgatcaaagaatacaatttcacctgcagatgcggcagatgccaatgtggattgaatgactgtcgtgtcgtcggttgaaccatctcccttggcacctgcgcttctaatgctgacaaacgaagctactggtgattgcgcatattgaggcttggatttggtgaaatacctgttcgatccaccagcaagcaaagcactcgggcgcgtgggcgcagtgaaggagccttggaagttggtcggtccgtttggagtatacttgtggccttggccccaagcgccaattgttgtggaacctgtcgagccggcaaggacagtaccactgacacctttgacggcaaccgggacgtttttcaaattgatgttctccataatgaggctgccagtcgatagtgtcgaggactgccaagcggtatcaacaaaggtagggcagttttggatagtgctgtcaagaatattgaccgatccaacgagctgattcccagcaccaccgttgctgatcgaaatagcagttgtacagttaaacaacgatagaccttggtaagtccacccccagttccagatctgagaaattgccgtcactgtatttgaaatgaccaggttccgcatggtgaattgctgattgccaatattggcaccatacaggccacctgtaattaccacatcggtcatccagccaccagagcctggtattgcagtactgcattagtatagatctaaaagaagttcacgtaccaacataccattctcaatgaagataccctgatgctgcgttccagaagcagaactcatcacaatgacaacattctcgatgctggaagcttggccagtcggccaatgaataccagtcgcagcagtagcggcagggattgcagtcaagtccaatttcaaattgcgaatctgtctaaagaacacatttgtcgacgtccagccctggtttccatcgctctggtattggtcaccgtcaatcatcccgagtccgacaaaacctgcggttgcttttatgacgggcatggcattcggattgccaatcagctgggtgaaatagtaatcaatgatcgacgttgagattagatacgttccagatgggaagtagactatcgcgggagttgttgtggaggattgtctgcttgccgggccaaaacgaccaccggcgcttatggccgcgttgatggcggccgtatcgtcggtcacaccatcacctagatttactttagtgcttctcatggcagtaataatccgtagatgctaacctttagctccgtagtctttcacattccggaagactttgtagctagaagggtttgggttgaaagctgcgacaccttgatgagcgatgtctgctagccagtagggagtgtctgccgcggccgctactgcaactgaagatttggcattcgcggcgactttggtttcaaagcttacagcagccgaggcgattttcgttggagcaccgaaggacatatactgctcaaaggggagcatggcagagctgactatagcatccacagcggggatctccagtagctgtgcattggcacaggccagcaagaaaagatacttgagcacagaagaataatacatcttgaccccggagaactgaggggaaagtcagcgaggcgggtgcttgcgaatcactggctcgagaggcatgggcaacgtgggccggggaaacatggtttatatatggccacccggtgattttggtaataagctcgatcggataatgcaggtatgcgcatgacagaaaagggatgtggtcaatgacactgcatcttcagccgagagaaaagcaaattcaggaatcccaccccgaaataccactcgagatggggaaatagataccgagtgactgcagaccaggggtctccattggttatttattttccggggaagttcattcttctgtcacggcgtattctctgtctcatgatatgaagttgcgcaggtggagatgagaaagtgaataaatggtgctgatctttccccacaaacgatggagttccctgtctctgcctgcatgtcggccaatagtcaatcgaagtctagcacatttcattttatagaaaacccaagccaaatcactagtttggcgcggatgcttcccaatataggaatggaatgtgactagttgaaaataccattgcagccacctttcggagtatgtgagttagggtgcgactggtaagaaagccccaggggcttatactcatattggacttcaaagtgtcctaactctgattaacttaaatggaaataaggtcagcagacccacggaacaacacgccctaagtgcggggagacgaaactgaagacccgggtacttccatcttataggtcacagcattgtctggactcgagcacctttgacttgaacataatactcaaatggtagacttacatcggtatgatcttccggtcgtccgtaaggtgtacagcccacccagctgttccccttgggttctcggatagattgactgtgcacatacatacatcatacagtctcactttatatatacatacttggtggttcagcacatcagtgaggcgcttgaatccactggccaaaatcattttgttataaattaggactctgcttcacacaccagtgtcatttatattgttttcagggtccagtgtaccttgtagtgttactaagacggatctttcttccgttggtcaacgtcggcgacatcatgaaatgagcggggcttctatttgagcatagaaatattccgttttaccgtgtttcatactttgttgctagaagtgagggaagttcagcataaagaaatgatgataatcggacaaacatatcatccctttcttccctttctccaatgcgggcaaacaatagcttggaaagtcccgagcatggaccttggctgccaagaagtatcacgtgatcgattcttttccgccttggatgcttcctgccaaaaaaaaaaatataacaagtcgtgactcccttcattgcgtcgtgggacatatcgaaattcgaagacaaccatcaccagggacagcaatacatcctggatctgtctcagagctctcttcccccaactagaaagctctctcgttgtgctgacagcttcctgcgcgacggatcgcgaacgtgtcacggaaccgcgaataccaccggacacccccatcaaagacgttagagacaaattgggttttgctctctccacggctgacaataactaagtgagggtcattatcatcaaagctgttgctttttcgagtcggagtggagttggaaagagcctcgccgcacaccgaatgctcctgccctcttcgattagagcacgtgaggaaattcatcacggcatcataccgaaatccagtcttgcgtcaggcttggtttaagcccttagaccgggtcatatcgattccgaaggagacgaggcatttcgcgcagttcgagcttgcaaacgtacaagcaacggcgtttttcataggctcaatatgttgaaacgcggagctcaaggcccccaaggctccaaagaagatgagggtgttttcgggatggccagcaccccggatgacaagcctcatcgggcgacagcggcccagttagccaacagaaagtaagcgataactcagatagcggtggatgaccatggactgaccgaagatttctttcaaacctttaggatcaaggatgtccgcagacgccgggctgcaactcccacaaccggtggagccgcatctgatgcaacttcatttaaccctttcgcatccgtggccccggccgcggcaccagcacctacccagtcgactgggttcacatttggtcagactcagagccagagcttccctggggcaagctccgggcccagccagggtggaatgttctcgtcgggcactaacggccaggccggtggtcaggtgtccttcagcttcggcgccggcccgacctcatttggatctgcaccgccgagcaatcctttttctgtagagacttcatttggcggaaatacccagtcgagtaccaatggattcagcttcgggggattcaataccggaaaccagtccactccctcgttcggtggattcggagcacaacagaacacaagcactccagcaaagcccgccctgtttgggcagtctgctgcacatatgacttcgcctgctgatgacagcatgcaaacttcgcccgataccaagcccaagggcgcttcaatattttcaacgaagccagcagcaggtccgccggcactgggcaatccattctcgaacctttcagggcagggcgcggccagcaatccatttgcgccaaagataactgcgcctgagaaagcagttgaaaaacccgccgagacacagccattcacaccacttttcggatcaacaccggccgcttcgaagccttcggatggagataaaccacaaccaactgtcagcaatccatttgcgccaaaggtaactgcgcctgagaaagcagtcgaaaaacctgcggagacacagcctttcaaaccacttttcggatcaacacccgccgtctcgaagccttcggatggagataagcctcaaccaacagccagcaatccatttgcgaacccgccagggcaggctccaaccagcagcactaacctgtttgccccgaagacaacaccagcggagcaaactcctgcgaagcccgcagagccggcaaagccttttggtgctctttttgggtcaacccccagctctcagccctcagtgcctgttagcaatatatttgcgcccaagccaacggaagaagaaccgaaggcgagcaatccgtttgcgaacctgtccgcgccgagttcatttggtaccttgtcctcgccgaaggttactgggaccgaaagtgctgggaaggttgccgacgcacagccgttcaagccaatgttcggtacacctgcagcatcaaaagtctcggaggctggaaaagatcagacgcctgccccaacatttggcaatatgttctcgccgaagccggccgctgagaacgcggctgcgaagcctgttgcggaccagccgttcaagtccatgtttggtacacctgcggtgtcgaaagtttcggaggccgagaaagaacagactccctcatcagcatttggcaatatgttctcgccaaagccggttgctgagagtacgggtgcaaagccagtcgaggacaagccgttcaagcccatgtttggaacacctgtggctggaaaggaacaatcagcggcaaacaatgtctttgcaccgaaggtgacaagtgaagagcagactcctgcacctgcaaagaccccacaattcgggtcgatgttcggggcgtctcctgcgccgtcgaagattggagaagggaagacagcccagccaacacttagcaatccatttgcgaacctgtcaggccagaacgcgtttagcagtccattcgcgccgaagccgacagagcaggctgcaaagccccaggcaccgagcacatccctctttggtgcaggcacagcagttgacaacaataagctgaatatggacaatgaggtcaatagagacaataacatcgctctgaataactcattgtctcacccattcacccctgggcctaaggtgtcgaatgaacctcaaacggaaggcgcgacaaaaactgccacacctcatgtgtcgttcgcgtctacacgcgacgataaaagctcgtcttatttacctgtcccttcttcctcttcttctcttccctcttcctccacaacttctactgtttccaacactttcactgcttcagaccctgacagtcttttcccacgaactggacatcctgtatcaattgactatcctgaaccacctctagatttcgacagtatgcctcttaagcgacttttcaatgagcctaatcgcgaccagcttcgggcgcgagccaatttgctcatgaagattggcgtcttgactgagtcgtttaagcgtgaggtcgctaaatgcaaccccatgactgatgatattgacgaagtcctcatcctttatgctgaacttcgccgtgagctcggtgtccccattgggaccatcaaccccgaagaagaggctaaacgtgcagcccttagaaaacgcgacgcggccaaggaagcggcaggtggcatctcgcctccccgcgatgcggccaaggaagcgccagctggcgcctcacctcgtggtgccgctaaggaagtgccaaatggcgtggcaacacctcggatcccgacccctccttccttcgcacctcctggtgctgatgacacacgcccaggaccttccaacaagccttctggtggatctactacttcgtctaagttcgcccaatcattctccgctccggctcctgctccagtcactacttctggtggctctccctccacctcgactgctggcccggcggcagctccagtttctgttgctcctgttgagccttctcccccagctgctgcccccgcctttgaaattcccaagtttggcagtggggctactggcgccgattttgctgcccaattcaagtcagcgtcggacaaggccatagctgaagcaaaggccaagagaaaggctgaagagtttgactccgatgaggaggatgaagcggagtgggagcgcaaagacgaggaacgccaacgcgaaaagcgcgctcaaattgaagctgcagctaacaagcgtcccatctttgtccccggcgtgggtttcaagttcgcagatgataaccctgctccacagaacgttgaggagcccgctacatctaccgcccctgctgcatctgccaccccttcacagcttgactctgccgatacagttaatcctacccctgatctcttccctgctttttctactccctccgctcctgaaggagcaaacggtgcttcctctgtgttttcttctgcgtccagtaagccggtcccagcctcgcagaacattttcggcgggctcaagccgtcctcgccgaagcgcaaggcgggtgatgaaagcgacagcgacgaggattcccctgcaaagaagaccaagtcctcccatagcattttcggtggacccgtgccgacctcgcagaacattttcggtggcaagccgccctcaccgaaacgcaaggcgggtgatgaaagtgacaacgatgaggattcccctgcaaagaagaccaagtcctcccatagccttttcggtgggcccgtgccgacctcccaaaacattttcggcggcaagccgagtgcacccctgccagctgcttcgaccgattcctctgcacagcccttgatggccactccctcggccccttctactcaacctgcctccaccaccactgaagaggaggacattgaagctggtgaaattttcgatcttacaaagggcaacggcggtgaggaagaagaaactgtcctgttcgaagacaaatccaaggttttcaaacttgagagcgcttggttgcccaaaggaaccggtcccgtccgcgttctgaagcaccctgtcactggacgtgcgcgcgtcgtcgcccgtgccgagccgagcggaaatgtcaccttgaacactctgttgaagaaggagttcgactacaagctcaccagtaacagtgttcagtttctggtgcccaacgagactgggggtctcacacattgggcagtccgagtgaagaaagagagactgcaggagttttaccagcttgtgaaccatatcaaaaattagatagtttttgatatcttgcatctctaccattttgctttctgatgtctccttttttttcttctcttttttgtgtgtgtgtgtgtgtgtgtgtatcgacctggacttggacaaagttgatatattgagtaggactatctaataagaaaaccatgcaatccttacagaacctcgtcatacatgtatggactattcatttgagcctgctgttttccattatacattaacccttcttcctctcttaattcctctataactctatatatacacgaaaggcatatttctaaaaggaaggtctgaggctttatactgtatccctccttgaacactatcgattcctaatatggtggcatctgccaggtctgtatactccttagccagctcttcgattcccatacagcctcaaacccgggtaatttcctttacccttttctttctttttatgaaggtaatagagtctacatcattgtatttccgtggatgaagaattgattattgattttctactccgtacatatctcgtatcttgtaaaattaatttaactagtcgaaccttaggcccttagcgcttagcgcctgaaacttatgccttctcggcttttccagttctccttccattttattccctcacaaaaatagtcactcgttaaattccccttcatccaaaatgaaacacgtcgctctttctttcctaggcctcgccagcctcaccagcctcgccgcagcccgcaccgacctggaaggctgcgtctcctcaaaagtcatcttcgaccactactacgccagctacctctggtacgtcccagagaatggcgagatctgctccatcctcaactgtggcggcggccgcgcacccccaagtaccacccaaccgggatgtccagaatacagcgggaccgaaccacttacttccgactacttggagggctggggacccaatggcaaacaggctgcctctacaagcaccgtggcatcgactgcttcgtcgaccgctgacactgtgctcgcttccgctacgcagacttccgaggcgttggactcgtcttccgcgtcttcttcatccccgtctggcactcagcctgctgatagcatgatcacggatggtccctctaggatttctacggtcacttcgtctacttcggtcactggtagcgatgcttctacttctgctgcggcgagcagctcgtccgctcccaatgctgccactacccccgcctccaatgtgggtggtgtcgtggccgtgatggctgctgtggtcggggctatggtgctgtaattttaacttcattatgtacttataccttgtgggagatagacggggatcgactctagatatatagttatagatgcgaccgcgtatagaaactggaaggccgctcacttctatttcgtgtgagccttcattgaaaatcaaatccgctttccctgtaatgcggaatcttccctaccgtagcccctatccgaggagtttgagccgcatcgccgatctgacccgccctcttggcgagacccgtgtctctccaatattgaaattctggacatggtctgtgagtgtgggcttaatgtctcgatctgcgattgacggctatccctgtataaatttatccccggaggtaactggcgttggaaatatgtctccatttatggaggcgcagccacggtatgcttcgccagacaaaatcgaagagtgccggatgtagcatcttaaggtgtggaatcttgtgcagcctgataggtgcgtcgctcttccagtgtgcggaccggattatgagggtcctccttcatcgcttccttcaaatatgttgtaagtcaaagtatagttgaagattttccggtaattcacttggtttaggcccaaactgaaggattgcgccacgagtaagtaagtacacaaatccatgcttgagtgtgtttggtttggggacactcgaagggaatagtggaaatattccaagtccgacgtggagatagcaggtgtctgtactagacaaacaagtatttaataccgaacgaacttatatgtatgtgctccaaacgtattttatacgattatccggtattctacaatacaacacctttcagttagcggttcttggcataatcgtccaaggacccttcagagtgtacaggcgtcaaaacgggcgtggcaataaagtctctctgtttgatgacccggtggacaaccattctacaagaggtcaacaacacagcagatcctcagcgagcctcttcttggcccccacagctacgccctgccgccctgccgatcggatggcgcactcggctgtgatcatgtttcttccgtcccctttcctggaacgcgcccgtacaacgtgttttgaaagagacgcgaatatcccattcaaccaaggagccacggaagatcgaagaattgacacagatatggctctcacaagcgaccgatgattgtaagtcaaggcagaagacaactacagattcaattgctgcagaaggcacaagagatctgtggtcgacatgtgcaattacgattgctcggtccacccgaccacaatcaatgaggatgacgatattactgggatcggagtgagtgtcgccaatgaagtcacctaattgacggatcgctcatctttaaaggtcttaatcgggtacaccgttactgcgggcatggtagtggtgactatcgtattttactaccttctgtcttaccaaccttgtctagacccttttcgcgatgggcacatcgatccccttttggccctacagccacgaccgaatccgattgacgagctgatgcttcggggtccacggagactattgactaagatatttggcacaaatagtagtgggttgaggatccatgcccgttttgaagactcgctggtcaaggtatgttacggccatattgtgaccttttgatcaatgctaaaatcaaacgcaacagtgtgtcctcgccatgagcgacatccagatattcaccggaatatccatcatgatcagcggtgcggcacagctcaagtgtggaatttcctgctaccaatggctggtagtagtctacctggcatggttctccagtctgacccatctctcgtgtctaacccttctccggaactatctacacaatcgaccggccgaacgcacctggcgacttgtttgcatgtttgtattggtggctctcctcttcttcgcttttctccccacggtcaattataggtggcagctgggacgttctgctgaaggcgccggtcctcccacacccgaggactacgcaatctgttatctgaaaccgatgtcacgtcttgattatgatgcgcactccatgtattgggaagggttgaattatcattctcacagcgaacatactatcgttgctacgtctatatccatcgtattgttatttgtcggatttgtgtgtcgggtcttcaaacttcatcagagcttctcgaagtttcttgatcacagcattcgacggagaatcagtcgttcacttcgtataccccttcgtgtggtttgcgactggtgtgatgttcagggctcccctcgaagcttgaagaggtacttgctttatcggcctctattagcactctttcttactgcccgagtatccgctgatacctggaactccatgttctttgaggtaagcttctcaccaaagtcttgttgataacgatctaaaattgaagccaggtatggtggctcatgatcagtttcatttggggcgtggagcgtttattcaatacaaccgctatcgtaccgagtaaggaggacacaaaatggacttttggtcaggttatgtccgttgctctccttgcgatacctctagtgacggccattgagctgctttatccaggtaagttcccaacgtcgttgcaataaagccgcacaactaagcatcccggctattcccagaatccgagaaacaaaagaaagacacacagcaaaccaaaagaagctgcctatcatttgatcagaaccaggaccgctctagtctcgaatacctcgacgagctgccttcgccaattgcacgagatctcacccgcacctcgcacgaagtcaacgatcatcccgactacgaactgtattacgcgtcgggttccctgaatgtgccggctctgacgcttaccctatcagttgttttcatctcactctggtgtctcgctcaggcgtcaatgttcaacgacctggtgggactcggctttttgcaaatatccttttacccctggggcgcaattccactggtattgatattcagcatctacaacagcatccttttttcctttatggggactggtattgggaccatggaacgaggtagccgagagactaaacgcttccttgtgcaattctcacatgtcttcgtgacgatcttctttattgccgtcactgccttcatgtttctctatattcggggtggcggggaatgggtccagtgggtggctgttggtgtatttggcgtgtacttcctgtgttctttgtttatagcatgtcagtgatcttttgacgctattcaagtttttagtactgcatttttcccattattcggagcctcacagcgtcggttgtatgcgaacggccccacagtgctgccttggtaaagatcgtcgctgggcacagccttgcggcggagttcattgagaagccgattctcgcagtggatttattgcttcatgagatcggaaattggactaatgcccaggtcgcttttatctgccaagccaggttttttttttttttttttcctggtgcttacgagtaatcgaagagggcagtgatactaattgcttccctatcattacttccttcaacctggccagcccccacgcgtcctctatgccgatcagtatcatatgctgctgagccgtgtactccatagcctttcttcactttgccctttcgcccattctcgactccctagtccaactatctctcgcctctaagcagcttccaaaatggctcaggctaagtcaactggctatccaacggacgatcaagttcggccaagaaaagcagacagtagcaccgagtcgaagagaccagcaagtaagcaccttacctccgttgtccaaattgtccttttaactcgatcctataggcacggcttttcggcagcagagactgaaagcctggcagtcagtttttgatactcaggcttctctgaaaactacatatgtatttactgacactccgacaggccaattctaactcctaaaaacgtccttcctatatttttggtcatcggggttttattgatcccaatgggcggagttctcatctgggcgaattctttggtgaatgtgatctccctttgataacagacccatctaatactaaacatttgaaaggttcgcgagatcgtgatcgactattcggattgttggaaggctgcgccgctggactcatctatagctatccccgataatgtacagacgacattcaagtcaaagaccagacaagatccccactggcagcgaacacacgacccagcgacgaataccaccacatgttctttgttctttgatatcccggagacactggggccaccggtatatctatattatcggcttacaaatttctatcagaaccatcgcagatatgttcagtcgtttaaccaggaccaactgaagggcaaagccgtccgtaacgccacattggctaacggcacatgtgagccctgcgcggttgacgatgcaacaaaaaaggcctactatccctgcgggctaattgcgaattccaaattcaatgacactatcggtcagccccagaatctacaaggggaggggacatttgtctacaacatgacaaagaagggaatctcgtgggagagtgacaaggaattgatcaaaaagacgcagtacaagccgtgggaggttgtgcccccaccaaactgggccagttacggcctcaactacacttacgagaacatgcctgatcttcatgaagatgaagactttatggtttggatgagaccggccggtttgccatcgttcagcaagctctctagaagaaatgatcgtgacgcaatgcccaaggggttttacaggttggatatacaggacagtatgcttccctcgtagatttggcacgtcgcccgctaagtatttatcagggtttcgggtcactgagtacgaggggaccaaggcaattttgatatccactaggactgtgcttgggggcaagaacccctttttcggaattgcttatgttgttgttggtgggatctgtgtgcttgtgggagttgcatttgctattgcacactcaattcgacccaggtatggtactctcgatgggatcttctttcaggtgttaatagtttttcaggaaattgggtgactggacctatctttcctggacatcttcaacttgaccggctattgattgcattcgctgctagacaaactggttagcgtatcagacaactagcctactacaacagccttaaaagaaaattagattattcctttgttatttcttcctcacaaagctcaaaacatatgtgcaccttgatctaggaaaagacagacttataaggtatgaccatagcccctgtaaggatatcaagctgcttatgtagtgaattgatttggaaatgtacaagaccgtttctaagagaaaacaaagatcaacagctaatcaaacgatggtttcattacgaagcccaaacgaaaattgctggttcggacctgagaataaacgaatgtaaaggcccaatataccatattctaacaggccctctctcaaattctatctacttgaatggaaatttgacacaaggatgcagaatacccaagtcgaagtgtccggatctgatgaacgcacacagtttatcagactcaacccaacttatacacgcttagtactcccaggcagcagcagtagcattagcaggcagacggtactcaaaagccccagccgtgaaaggcacacaggtatccgacttcactccctgacggggtttcacgtccggactattgacgaagacctggtaaatgccattgttgtagggacaggcaaggaggccatcaaagccgtcaccctggtactcccactgtccatatcgatcgccagggacgtacttgaatccgcctgtcttgctgccggaatcaatgtgggtggaattggggccgctggctctgacggcataattagaatcgacatagataatctggcctggtacgacggtgtcctattactgttaggaacgcatttaatggagctgaggaagggggcgagtaagttaccaaagtgtgggcgtccttgagaatagtgtccttgccaggagggcaacggccggccttctcgacgttgggaggacagtgtgaatctgtccatccgtcgcctttgcccagccagaagaaagtggccgaggtagcaagtgcacggtactggacaggtccgtcgctaacggccatgacgtcgaagcgggcaggcttctggtgtgtggtgagggagttgaccccggccaagaacgggattagggcgagaatggtggattgcttcattttggggaagttgaacggttggttgactgagtcgatttctttgattttcttgttgatgatgataatacagagatggatcggttaagtacttatactttcccgagatgttacgcttcacggacaacgtccgataggaatagatgaaaccaggcaccaggccgtacacatggtcagaggctagtccgcttttttggtaggaggagacgatattttctggttccactgaggctgaatagagagggctgtgtcggactgtatgtctcccgatgctaatttcccaatcgggtaattctcatgtcggagtttgcagcgactatcttttctaccaacttaggctcccggcaataaaagattcgggccttttgaatgatttagtcccgaggatattggccagccttgcgtgtccacacagccttgtgggttccacataatataactagacctactggaaagggcaactcacctgaatatcgcctcgagcttcgttgtttcactcatacaacaacgacctgtatacctgtacactgaggggcccttcgcgacactgttgaaggaacagatgctatgaacggaaaattgaagcatcgaattggtcttttcaggccccctctacagaaatcgacaaactcaatgacttcagctacagttcacaatgctctcccattacctacatcatatccaacaaggtccatcactccgcctcgggcgtggaatcctgactggtacatagtggagcagggcatcgtgtacgcaccctgacaagtggcctcggtcataccaagcctcttataaattatgggtcgccgcagaattcccgcccttgctaagacacatgatgttatgttgcacctccagggacacgcgtctccaccaaggctgacagaaacactggggaaaagttgctatcgacaatcaataccttttgaagtattgggccaacctgcttcctgcacgaccaagcacaccttgcctcgcctgacgatcacctgaactcatgctttctggagaacgactgatatttggagaagcataatatgacgtctcggtgggcttcgtgaaccccggtctaaactatataaaggccccccgatcccccatatttctatctgttcaaaatcactctagccatttttatcttcttttacagggaatcgcctcataacagccatgttgcttaacaatttcatgctccttgttgccctgggcagcacctctgttctttccctcatcacgaagcgagacgcaccccccgacaacactgacggggcttacaaggtggccttcaagtgcacaaactcgatgtatccaggagcaggtacaatttctaccaccctttatttgcttatgtattgatggctaatattgaatcaaaaccaaagccaggggaggaccgagcgattacacacacaacgacgagcttaaattagctgtcgcggatggatcgcttcgctcaccagatgaatgtcacgagcaagacggtcacccggcaatcgcggagtgtaccttcaacgacgacgcattcgagggggggtccctgattgtccatgtgtacaatgacccgggcaactgtcacctggatttcgggtacaaaggcgagagcttcacggcgaagtcggacaaatgtggccatgacgatgggggctttgagcctttcacaagcgagaaaacagccatttgctatttcgatgcttaaatttgttcaaattgaacgctcctaccctgtcatggatttactgaggggcaggacatagtggggttcagcaaaaaggcagacggaaagaatcaggtcgtcatatagacgtgtagattgtagaagtgaggccatctagggaaattgggtagataagacaggtattctctgaaggataacctttaccgctttacagagaatctctctaaggcatcatttgcgtagtcaggtcaaatcatcccgatcctaggagctggaagggaggtggtgatgtattgaaaaggcaattcactcccgacctccgtcaattacatacatatatgtagttagggtaatagcggcctacatttgactttccttttttctcttctcttctcttctcttctcttctcttctcttcctcatccaaccttttttctccagacaccagtgatcccttttgcttcttttgcctccgtcaggattattacttttcttctatattgagccgatcactccgacatctcagatatcagtttaggcgatagccaggggtagatgcctttcgcaaccaggatggtcaccacgcgagacccagcagccttgaccgaccttccacttgagctgttgtggatgatctctgagcatttatcactagttgaccttgcttgtctggcactaggcaaccatcgtctgctgtcttcactcgctggcactgcttttcgcgacttcacaaatacaaatggccgcaacggaaaccccaccgatgacgcacgcatcaagctactatctcggctttctcgcgacctaccgcagtactatctctgcttcatctgcctccgacttcatttatggaaaaacactcggctaccaggctactttcatatcggttgctcagatggcttagagatgaaagaccagtgccttcaaacacgtctacccctctgcttctacccatcctataccttttaccatttccgcttcgttcatcttcagcttgctatgagaaggttttaccatggaccgcgttttggaattcccgttgagtcaatgctctacacggaggtagcacgtcatcatatgaaagccaaagcccccctctggttgcaaccccccgtcaacaatatatcagaaaaggatccccaaaaagacgttctgatgacacttttctctgccgaggctcgaatttgctctacacctccgggcctatgcttgaggacgcaagagatagcggtagtagcacgacagaacgtaccacggatgtggccgtgccccgaaaatggactcgtggagatctgtaggcatattcacactcataaaccgggatttatcgacatctttacctcccagattgagcgttattgctccaaaacaaacccaataaaaccggccgaccaagggagttgtgataaatgcaatacctcttggaagttagagatgcgaaccctagatgaaaacaatgcaagcctcactctgacccgctggattgacttaggacctgggctgagcccaaatgatgctcagtggaggtgtcgctttggtattgaactactgctgaattcgccaaatcatgaaatagtggactcccgccagcggttcgagaaggactctgttcaggctaactcttcgaatgcattgtccgaagatgaaatgtattggcgaaacatctctttgctacaagggaagacataccaaaaattgatgactccaatgcgcttgggattctacatattgcacggagaagcaaagacaagttcttctcgttgtatcattctctgaagaaagcattggtactctgggtttacccacattcgctccttccctgttgctgcgacttcccaatgggaaaagccaactcccataaaagactcccctcttccctcctctcttctctcctctcttctttctttcttctctgcccgccctagttctaaattgttgacccacacacttgtgtacttcgttgacgatagatctatgtcggaccaaaattgttcgagtactgctcaagttgagctggccacatccctaggcacttggttcggtcctttgatcgctgccattgccgggatattagttgaccgtgctctcgatgcgtattcaaaaaagtccccaacccccaccgccgctgacaccgagcgctccctctccgatgaagtctttcctaccctccggggcctggaagctgacatcaactcaatgagatcggaagctcgggtcacgcaggaatctatggatgccttgcgtgacaacttacaaaggcagattgatgccatctcttccactggggggaaagtcccggatattgcttgccaggcttcttatcctgctcgtcaagaccctgagacttaagtggtagtgttggctgtggttgtatttgctttggtgggtgcttgcttgcttttgcttgcttttgctttcctttgctggtgtggtcgaacttggcagccctggatagcccaacttctggtcacacctttgtttcctccacccacatcccaaggagacgcaagtctccttgggcaccgccccttcgggggtggtgcgccagcgatgggtttgcacttctgcgcagtgctggcgaccagtacctcttcaaggttcatgcctgttgggggaagctaggacaaacccacaagcaatggtcttttcactcattcttcgtatggtgagttctgcccaaggcagcaattgacatgctaacacaatagtcgtaacagaagcactcttcattacgaagtgaccaaccattatgcgcttcaacaacggcaaatgaagcccggcaagcacaaggaggctgactacatgtgcatacgtgtcgtgtcatcctgtctacaacagatcattcccacagtatcaaaacagaatgaggagacaggaacaagggattgctgtgatggcaagatggaatttctgaaatggtgaacaatgctgaacaaaagcgaacaggtcatctgtatatagagatcaccaatatagccttgcggtcatccctcgactcgggaaaagcctaggcggggtctatgtttggctacaataccttgctctctcttgctcttgatcgcctacctacataggtacgcatagagtctaacccaaacgcatcctttcccatcgaagatggatgttccaggcttccaacgacagggtactggcgcacagcaggtgtgttgttatttcaactgatttgaacccactgtcgtcagttcaacacgaaggagttgccgacgagggtcatcgatgctcgttgaaaaagccgggcggccatcttttttgccattgcaattcacctgcatgatatggactgacattaagccacgataatggtgacgttatctcttttgccatgcatttgatgggccgcatgcccatcgtcaatggacggatcatacaacgcagaaagatcctcgagaaccatatcttactgccatagagaattgtctcctgtcttgagaaatgtcaggctccatggtatacattggaaataagccaggtcgtctatgcagtctcaaattagttgtacttacagacccccaaccacttggctaaatgtgttcaaagggcctagggactggctgtaataccccaggaaatcttgaactcctagccacttttgtgacaacactggccgtatatcccgtctccaggatcacactctctattcctgggagttgcgagcgctctgcaagtttcagtcctttagcgatagaaaaagctgatctcgcaacaaatccacaggagtcatcctatcatccccgttcaagcgatcatccaacctcaagacacattcacatcgcgcttggagcactccttgcaagatctgattctctccatatcccacttccctagcagtttcttttgcaatattgcttccgacagtcagcactaacccagcgatatcaacagcagcgttcccaatgccagcatctgcccaatcaaggatcccagttatccggccactttggggacaaatgaggatatgttcgcctttaatgtcgttgtgaaccagtgctgggcggtattctggagacaggtgctgtatcttctccagcagggtggtttttctctccagtaacccgtttatggggctttggtttccaatatccttcgcaatcacctggccacgctccaccagccttgtccatgcttcgatcgcagactctctgagtaacttcaagttggggaatgaaatcaaagggatttttacccccagtctttcttctaatccttctatgttgacacacttcaacatagaaagaaaaccacccagtccttgcacagtcaattcagaagcaggagcgcggtgcaaccccaacccttggagcttggtttcgagcgaagctgcatagtccccatcatcgctcagctgccagctcccgatggagcgtgggatgatacgttcatctagaccgcgagcccggtactcatcttggacaagtccgcgcaatgcgatgtcacgagcctgcatctcatggccattgtaagagcgagaaccatcttcgcgcggcttggtgactcggataatgtagtcgggtttggagtcgatgaggaaaatcatgtggtcatcgccttcaatggtgggttgccgagtcagggatatggaggcaggagagcactggaggactgtcgctacacattccttcagtctggaaattgagaatgggagagtgtcgggcatgatgaatgagattgatatgtttttgtagcttgaagagttgaaggaggtaggtgttatatccttctggtgtggatcttggctgggacatcggggtcccaaaagagtatcgtggcagccacgtgtatagataacggcttgcaccgtgacgattctggctattttggtaatatttttgtcatcgtaattgtctttcttgtcttgccatcaaaatcatcttatcgactatacccagcttcctgaaacgcccgtacgtatgcaaggcatgtgcagacttattcatgattccgccgccatggggcagatccgtgccagcttcctgtcttttatcgttagttaattcgcatagttaattgtactatgaggaataacgcatagtgaggaatacatatagtggtggtcatttgattgacttccaagggttttccttgggtacgttggaaactgatcgcagaagcttaaacccatacttttaattaaagtagcacatattgttgatgaattaaagtagcaattagattccagatagcatccccataggctcttcgtagcacgacattcaaatacgagctaaactgctcgcaagtcaaccctatgtatgaccagctgcacaacagtcccgaaaagcacaataggtaggattgaaacttgtaggtctcagttgggtgctataaagaacataggggcataattggtcactcacgttgtatcctcaaaggtcaacacaaacttggtttccattcaagacattgatgcagttcaaggcatcaaggtcggatatgatagcgaaaatagtcacatccttgaccttgcaaactgccttttgattgtttttgcactgaatcttgtcacgtgcctccaggtcagaagctggggaggcagagacagccgcagaagctgccagggaaagagtaagaaatgtgttgaaatgcatacttatagtagatcgtggtaaataaaggtcttcaaaaagatgtgactcgatttgacttccagtctttaatggtttctaagcaccgagatgtctccgtgaatcacttaaaagattgtagtcgaccacgcttcctttatagaatagcgaatagccagagcagtcgataaaccgccaccctacgtctttcatattccatcattaaatgcttcgtgatatcatgaagcttaatgcaatacgactgtttcactgaagcgtggaagaactgagaagtataggacaaccaaagaaagagatgtgcgttttgacatgctggaaggtcgtaagtttcccgattgtagaagacaatacagtgaaacaaactctcaagttgattcaccaacaatatgacggtttccttgttttaagaccatatggatgaaagcggaaccagatcgatgttttgactttatatgaacttgtaagtgttctaaacttcaagcttggtactactttaaaaaagattaaccttatttcaagctttaacccatgcccaggtggatttaagacatccagagatataaagatattgcgccaccttagagcaaatagctggtcaggcgtggcatggaatcgaggctgagcaagtctagacagttcgtctctccattttcccggtaaagtcagatctcaagacggccgccaaggtacgtattattacctaggtagttgcctctaaaagaggataacggatatccgtggttaagtgatagtcttctcgaaggttgaatggcttggctacggccagatcgcacccttagaaccttactgattccagaaatcacctaaatatacagagaagagcaatactcagtatccctatagaaagtgtttatatagacaaggtgccgatttgtagatattaattaactacatatatctgtacctggtatattatgtagctataacaccatctccgaatgtctaattcggaggaattgttcctatttgaggctagagcaaaaaattatatttatctacactaaattatctggaaagaagaactcacgataaaaacctcgagtatgaacaatttgaccgacctcggtcatgttaccctgcttatcggcgatatggccgtccccgcaattcgcaactccgatatatcattctagtcctcctcatctcttcttccacatattcccaacatggctaccatggctacatttttgaaaaagcccctcaaactggctcttgtccagctcgcaacaggttcgaatgcctacacctgcccatattacccaaactgaccgaaccatctaggagcggacaagtccgtgaacctctctcatgctcggagcaaagtccttgaagctgcaaaggctggcgcaggattgatcgtccttcccgagtgcttcaactcaccctatggcacgaatttcttccccaaatacgccgagaccctacttccctcccctcccacgattgaacaatcgccctccttccacgccttgtcggccatcgccgtggaggcgaacgcataccttgtcggcggaagcatccccgagctggagccgtctacgaagaaatactataatacctcgttggtcttctcgccgacgggcgccttaatcggcactcaccgaaagacacatctgttcgacatcgatatcccgggcaagatccagttcaaggagagtgatgtactttcacctggcaaccagttgacagtccttgacctcccggagtacggaaagatcggtctggccatctgctacgatattcgtttcccagaggcagcgatgatcgccacgcgccagggtgctttcctcctcgtctacccgggagccttcaacaccaccactggtcctctgcattggtcgctccttgctcgtgccagagctgttgataaccagtcatatgtggcactctgcagcccggcgcgtgacctgggtgctgcctaccacgcctatggtcacagcttggtcgctgaccctagcgcaaatattctctctgaagctgaagagaaggagactattatttacgctgacttgaataatgatgcgattacgaatattcgcaatgggattcctatctccacccagcgacgatttgacctttaccctgatgttagcgcaagccagaaataaagcgggggagtttgcggagactgtgaggtagctttgttagatattatatcaatttatctagacatggtttaaaccacctgaatattcaccacatcgttggaagtcggtatgaattctttgattagctgaatagagtgatgttgcctgaggcataaatacccacagccgaattatcattggttgggatatagccccactccacccaatcagactccacacaggcaagcgagaccacactgaatttcacacgaaaatcgacgaacttcttcttccgacaatcgatcacttccgcccaccgtcgaccaccccttcagttagtctactcaatcaccactccgaaatccctctctaaccttctccacagagatgtccaacgtcaagaccggcaacaagcgctcggccatcgccgatgtggtgtctcgcgagtacaccatcaacctgcacaagcgagtatgttgaacactatccttttcccagtctacctgcgacgattcgaatacgattcagttctggaggcatataatggacagagaacaagaaacttttcctgaaaaatggaatttgttacggaaaagaatgtgtgtggtgtgggttggtgtgtgtgtgcgtcgagggtggaatgggaaaccaatccccctttatgccacgctaccatcctcaccatgacctgtggagaaatctgcaggtaggacatggcatctttttgtctgtttgtctactccgcgagacagccgagaggagatcttgaaaaagtcttcgctcgcatccacacatatccgcacccggaacacaaaagaagaattagttttatgaagtccactatggccgaaagaccagaaacattcatcgcgcagagttttctctagcagatggcattcgggcggaagactgattgtaacttcttttccggaattatagtgccacggcgtcagcttcaagaagcgtgctcctaaggccatcaaggagatccgcgccttcgccgagcaggctatggtaagtttgagcaacgctctttccctgatccaatgggaaatcagtccgctaatatgctcaactcgcaaatagggcaccaaggatgtccgcgtcgacccccagctgaacaagaaggtctgggaagccggtatcaagggcgttcccttccgtctccgtgtccgcatctcccgcaagcgtaacgacgaggagaacgccaaggagcgtctctactcccacgtccaggccgtcaacgtcaagaaccccaagggtctccacaccaccaccgtcgacgaataaatgtgtcgcttttcgttagcatctatgattccatgttcctagctggggtgtggtcggggtttgacaaaaatacaaaataccttttccctttggggcgtccttatatctttcgttttagtattgtagtgccgtagttaacataacgcaacacgacaggagagttgcttggacgtggagcaatgtgaggtttgaggccttcgtgcaactaagtacaaggtctaataatcacaagttccttcagacgcctattggttttacccaatcggacgactgttccaagttgtgtcatggtctccaattagggctaggcggggaagccgtttatttgatcaatcatacattaatggctgttctagtactgacaaacactcttcttcgtaccttcctagagatatctgggcttcttagtgagacttttccagacctgccgttgtgcatagatatgacagagatcaccacatatcaacccatccgaggccgaagtatgggaacatgactcgcaataccctccaactcctaaatactatagcagttactacgcaacgaggtccaacgacagtgtctccctgtctgttatgcccgatagttgcaacctgatactcttatactaccttctggcacctgtctagtaaaggttctgcagctgaaggtcgcccctcacttcactccataccacgaacgtcagccaagagagaggccgtagcgatagcgagcggtcagcactgtgacaggacatttttatatgacctaggctaattctcttttgttcattgaagatcttcatagcctagcgttgaggctggctgaaaggtaaacgtgtaacaaaaaagatcacaccgctgattgacgatttgttctgcaagcatggacacccggtacatttgaattcacgtccgcagtcacacgggccgtgccgtccgtagttgtagggtgctcagaacacttgggcaccggatatgagtctatatctatcccgtgtatacaagtgtatacaatccacttgcggtgtaggccacaagtatcacatccatgtattatgagaacggagaaaagctgctatcaattggactacctgaattagctcctatcattatcagagtgtaatagacaagggtcggtgagagcgtgtgccgttcagagctgcagaatggcaatagttgaaccaccaacatatactctgcacggtgaaaatcgtcactcgatcagctagccacgacgaagcatcataaaataaaaaataaactatgcaaacaacagcctacagctttttgttaaccaacttgccgtaaatcccagggcaggaccagctctcggctggcctgacagcaccgcatagcagtggtacattgaataaactgaatcatcaccatcctcgttaggaaccagatggccaaggtgagacaaagaccggcagcggccagttcggcacccgtaggattaggtcctctacatggtttcctcttattattcaacgttgaagttaacacatacatgtgtgcacgcacagactatcctacatcactcgaatcgagtagccagccatgatctatcttctggccacttattagttgacgtatctcatgtgcatcatgcggtgtagggggagcaacgaaatctgaggcaaagtaactacccatttcaacatataaatgcgatgctttccttgactttctgatcatcaacaattccttcacacttccattcttcacaagtccttctatctcaatttgatcatcatgagtgactttactggccccggtaactacaagatctgggctcggcacagtgacaaagtgctgaacatttggggaggggacgaggaaggaaaacgagttggtacctggtgagtgaggatatatttacctatgtagatatttagcccgtatgctgaacatagccagggccgatctcacgaatggtaaatatggcgagtactaccagcagtacgttattgcagctgctgggaacgatgaatacttgattcttcaccagaaaaaaggtctctatatgactgcaacaaggggtatgttattctttcttgaactagcaatacagatgactttactaattcattttctaaagggggaaatgacaacgttcacttgaactggacaagcccgatgaacccagacgcgagatggaagatcataccggtgcgggatagaagtggagcttacaggtctgccccctaagccttcaatcttattttccaatgtttttctgactgttttcgatagcattgagagtgttggtaacccgggtcaggttttggacattcaagggtcccaaactgcagatgacaccccagtcctgacttggcgcggtaacaagggtaaaaaccagcagttcttcttgcgcatggcttaggtatcttcatacattacctacgtatgtacatatgtaggtaaccttggaagccaatcattcttttcgggtgtgcagcaagcgggtgccgttatactcactcggttttgggccctaattactccctggtagccgaaatggttgcatttcggccggccatgtttaatggtagtgaaaacaggtgttgtgtgagagaaaagaagcaggtagaacaaaccggaagacagattttctgtggaatggacgattaattgtacaggggacctaagcgaaggagatatccggttggcgcatggatatatatacattgtaggatacgcagtgaaaggtctaacgaagaagcatatatgcaggtacgatactgagcgccacactatttatcgccttctgctcgtgcccatataactagataatatcaaagatcgtcaaaatcaaagcagagaactgacgttgaaacagcaaagtatcgaagaccgtagaagccaaggcggtgaacgagagctccccaaactgccgacgtgaggacatcatatcagctctcttgcagtccgcatcaaccatcaacacctccaattccaactttacctccagggctaccttcctctcttacttcagcatctccgtcctctgtcagtgacttcaacttaaacagcacccagatctccaccatggagtccaagatccccgacttcttgctcgagcagcaagcacaaggaagcccagagacacaaccctacttcctcacctttgaagattattgggagcgaaaactatggcaccagctcacagactcgttggtcgagtttttccgcatgccagagagtgctccgcatcgcttagccctgtttaagacattcgtgctcagtttcgccgaccgggtcaaccagctcaagtttgtgtcgctgggattgatggcagctacagaatgcacaggttggtggtccacagtctagactggaagctccgaaaactaccctgatgagcattcggttgcgttggatacaggctaaccatctccctctagatgaccaagaacgactggctttcctcacatccctcgctagcaagaccgatacgcccgacacacaggatgcatatgtctacgcacttgctgacgtcgccaacgtcaagctgtcgctgaaggatctggacggagcacagacagacctggccacctgccagcgggtgctagacacgttcgactcggtcgagaccgttgtgcacgcatcattctacaaagtgaacgcggactactaccatgtacgtgatttggagcatcccgtcccaagccgggtatgaccactcaaatcaaagctaacacctttctccaacaggccaagcaagaattcgcctccttctacaaaaacgccctcctctacctcgcctgcattgacctgcaagaactcaccgagaccgagcgcgcatcgcgcgcctacaacctcagcgtagcggccttggtatcagacacgatctacaacttcggagagcttctcctgcacccgattctggactccctgacccagaccccgcacaactggctccgcgagcttctcttcgccttcaaccggggcgatctgactgcctacgacgtgttggccggtaacatcagcaagaacaagctgctggagactcaccgggtattcctgtatcagaagatctcgctctcggcactgacggagatggtcttccatcgtccccctcacgaccgctctctctccttccaggctatcgcgtccgagactaaggtgcagccggatgagattgagcatctcgttatgaaggctttgtcgctgggcttgctgcgtgggtccattgatcaggttgctcaggttgcgcagatccactgggttcagcctaaggttctggatatgaagcagattgatggcatgcgcaaccgtcttaaggattgggatgctggtgttaaccagctcggtcattggattgagggggctggtaaggacgtttgggctgcatagatgtcttatctcacttgtgttctgataagttctattataatgaatacaatggtgtctttttactgtgattccaatattgtaattcccatggtcttgttgactcgacatatctacttgctcgtcatccgcaaggaagacattgatatagtttattataacgaaccagaaccagaacaatcccattcgaaactaatatatacaaaagtccccgcgtcactcattgatgtccattaatcgaacactgcaaagcagcaaagttaggcggatcaatgtccgtcctattatgacatccctccgacttataatacatctccaagctatcaaagcaatcacaatcagcgatagtgaagatagcacaatacccattcttaagaacccacgattcaggtttcttcagcttactcgtatcacacccactccacgtaaacccatcctccgtccaccatttgcacgtcacgcccgtctcggtgaacttgctgtttataccaccatggagcgccagacagccctcgtcatcgaggaattctttgttatagccctcgaggtggtagtagtcgccctcgcagccggctttgctgtacatcgtgatctcccacggtgctttccattcgtactggggtacgggtacgttaggttccggagctggctttgcttttgtggtagtgggttttgtggttgttgtaattttcgtagccttgggagccttggtagtgttgtctttgctggatttggagtcggggttggtaggtttcgagtttgtgtctttgttgggagattccttgtccgcggttccctttgcattaccagtcggttttgatttcggagcctctgtcgctcctttcacggtggctgtaggaccggctggcggcgcgcggtaattttggcaatataaatccgagacgccacattggccccagaaagcacactgttgggttgtcagactaatctaagaaggttatggggactactcacacatttcgaatcagcacatgggttcatgctggcgaggtcggcccagttggctggacgtgttgttccgggtacttgtggaccacaggtagcttgaggaagagccattggcattggaggtttaccggcgctgagacagataaagtcgccctggtagagctgtctgcatccgagccatgcccaggtgtttttattgaagctttctatatcggcttcggtgatatcgtgtgctttggcaatctgtgcacaggtatcatagccctggatgatgtatttgaagcaatatccgtccttggttggtactggggggacggctatcgccatacggagtaagagaagccatagggcaagaaggtcgattctaaaggaacgcatcttgtacagatcttgggaatacggctatttgtcgagtaacaaggatcgttattctttatatagattgatagagagaattggggccctggaatcgggactggatagaggcattgcatgaaagaaatagagcactgtttccgagttagggcacgaccggtggcaattggtcaagacaattcgacattaatggacttgatgaatgtgagatgttagtattgttcaagggcctgaacaaagatccggggatatgtggtgcatggcaagtttgacatcctggatattttcattgttcgctcgaatcagccgtgcatgacctttctaatatgggtatgtatacagtcgaggcggtctttgtttaaccttctcttgggcacttctggtgtcgaatgccgaatgttctttgatcgtaatttgccatcgtgaggcgatagatgcttgcgccctagagtgagaatgagaaaccgagtcagttctttcaagacatggcgtggcaaatgaaacacatcaaggggaacacacattcagagtacgtattgagcaagggtggttatacgcacctagttgcaatcacttgctcctgatgtattcgcagtgcattggtctatgtaccttggacgccaacaactgatgtcgggagtccctactgccagcctgtggtatccagggccctagtcccgtccttgtttctgtctctttatcttggtagttaaagtatgtagatgcctggatttgtattttattaatatcctaatcattgggcccatacgaaacgcacgagacaacaatgtacaacaatataatcagaacatcgacgaccacagcaacacacagccaatcaaccaagccggccaccacacacaccaaacaactacctgggtccacataccccaaatatcccaaccgaaggccgcctgggtgagaacagtttcgactgagattcccatataccagcagacgccaaggagaacagttggcggggagacgaggttgagaagcaccagacccagactggaagttgccaagcggaatggcgcggagccttgcaggcgagcgacgaagctaagtggtgcgcagagaagcccaatcatgaatgaaagagagaagttgagggtggcgagggttgagagggagagacctagtaggaggagggagaatgattttatgaggtggtactgttgggggatgattgggtttgatagacccaggccgttggagagaattgcggcgaggaacagggggaggatgatgtccacaaccacaaatatgtaggtggtagttgtgaagtactgtggatttgttagcagctattattattgttgttgtgtaggctggtagttctcacctggtggaatatattattaaagacccagagcgggacaaggccgagcagatggagtccgacaacaagcgagagtggtagagcgaggtgtcgttccgcgatgccatccgtctttgccttctcttctgcggatcccttctcattcataggtttggcacttggtttgctttccgggtagtacccagtccgcatccagagggcaattgccattatggtgaaatttccagcaatcagcatggcactaggcaagtaggttccaatgctaacaaaacggttggactgcatgagcaggtagaagaaaaagctctggtgcaggtgctccagcaagttgttcaagctgcggcaaagagactcaatcgtccggcctagggccatttcgtcctcccatccctcgcccttggtctgcaaggtgatagcgtcgatatggtacggcatgaagctgctgtgcgcaccggtggcatagccgagaccctgcttggtcataccgcggaacatggtctgcagacgatgctcgtagctgtcgtcgtgaccccacatttcctgcagattggcaccgatacccatctggccgcctgcaatggctacagccgtgttgaacaggtcgaggttgggaagttgaccattgaccccgtcatatacaatatggagcgactggaaccggtgatctaatgggtattcgatgaccagtgctccttgcaacgctccactcttcaaaggaagtggctgcactgaagccgggtgcatatcatgataggcatcgatccaagcctgagtcccagatttgctgtccggtgtaattaggaagatgatatccttggaccataatgaccatcctagcaataactgtcagtaacccggctagaggagcgcaaccacgagacttactcttgaagtatctcgctaaggtcagggcaagagtgacaccattcaggttcaatttatcatcagctgtaatccacggcgcaaccagcacaatcgcctccgtggcatcaccgcgcggcgcatggataatagcataagtgttctccccctggtgcgtaatgccggcggaggtgtattcgtatttctgcgtggcgactttaaggcccgccgcttgcaagattgactgcagcttgtccgagaccctgtccaagtatcagcaatagtccagcctgtgtccggttcattcgacctacgccgctgtcacttccgcctcgtccttttgaccgccccttgcctgtccgtcattcaacaatccttccaattctcttttataacctcggaagatgttctgctcgcttcccgtgaagtacgcatggacttggcccggcaggagcgcattctcggagatgtaggtttgtcgggagtactcattcaaaggcaggagaagtagccagacaacgccgacgacgacgcagataaaggataggagattcgggaggcgagcgaagaggaagtggggattgttccgcaagttgcggattgcagctggcatcttgttagttgggtctccgatactgccaggaaggacaggtggtatgtcagctttgctcacatttcaacgccattgactattgaccatcgggaaatcaagtcccgtgccgcgaaggcgaagctgttaaatgagtggaataattggactgaactcggagtcttacaagtcaacagtggagatcgagagctccgttgtttatgcgcgaagtggaatttacgccgaacgacaaagaccaacagtgcaaattaaatgtgagtatgcacacgctatgctattatccaatggctcccgagtctgcaatataaaaaaactatagtggaaaatatacattaaaaatgagaagtgaagaatgcatcaataccgagatcaggctcccaggcgctgggtagatccgaggtagctcatgggtgtttggttgccgctggcgccggcagggttggtgcttggaagaactccataacgaccgtaggtcttctggtcgacggagacgtagtgaggcaggcgtcccaggaggttcagcttgccctcgatccagcggaggaccttctcggggggcacaaacaccttgaggtatccgaggccgactaacgacaattagtagtgaaaagaagagtctgagaagggaactcacggagatagccgacaagaatcgcgcagagatgaccgaggaagctcacgttcgagatgaggatggatacaacgacacatgcaaacaggggtgaagtccaggtgggaatcttgtatgggccaagactgaagggcgttagcaaaatttaagtaggtttttccaagtaaatcttacctgaagtttggatgcgacctgtaggtcttgatggcttccgaaccaagaagcaagaaaacccagatgctgcattgaaggtcagttactgaaacattcgacctggtgacctgaagcataccttgcgccgaccaccgaagtatttctgtgtaggataaacctctcaaacaagatataaagcccagcggggaaagtcgacagagctaaattattcaacattagtcaaaacggccataagcattgcattttaccagagcactcacgtccaacaaacaatgcaatagcggtcaaagtaccatgttctgcctcaaagcgctccagcagcggcgtaaccgccatagcattaaaaaaggcatggaagaagcccatatggatgacgggataagtgttaagtcggtacactagtatcaccaacagatcagcatgcgcccaatatgcacttctaacatggagtcaaacatactagtccccaggttaatctcctctgggatcaaagcaccccactgtacaacactccatatagtctggaattcaagcagccagaaggccagaataatcaacagcaccagtcgcgtgaacagcggtaatcggaggaggtatgtgcgtatccgacccggattgaaaggcaacgggggtaaagcggcgggagtcgccatagttgctgaagggtgatgttccgtgtagtatcgctctcgaatggagttgagacgaaagcactcaggcgggcgtagagttgggctggcaagtcgggataccccacgactctgaaggagaggatttgcggtcggagccgttaagaagaatcgacaattgcgttcaaaggtcaattaaacaattaatgactggtacgaaagaacaagttagattctgttttcctcgctagttgaacttccgggccggtcccagggataactcacaaggcgcacgcgatccctgacgggaatcgaaagacaatgagacaagaagcccccaactggaaacgggtagatctccgaatgacaaggtcagaaacaacgtaaatgaaatattaaatatcgaagagaagtcaagggagatcaaccggaccattcaatccacttgttcgcgaagttacgccccgcgataaagaccaaccgcgcaagcataaactacccggacaggccctcgggatatcaggttagtgcgatgataaattatctcaatttactactggccgaatggtctattcgtcagagatcaaatcgtgttgtgtatggctatttggtattttatttatcctaacccctcaaccttatctacaggtgctggttaaaccaggcgatggcctggcagaaagcctgctccttagcccacttctgcttagggtcgctcagatcggcgcgcacagcgaagccgtgactgacaccgctgaacaagttgatctgccacggcttgccagtcttgatgagggtctcctcggactcgtgacgaagctgggtagtgaagatcgagtcgacctctgatacacgcaaaattagccattgatgatttttcaaaacgatatctagcaatcatcaacttaccagcagcagcgatagacaagggaccatcaatggcgccgagttcctcgtgggtgacgaatgaggggtgcgcagtgtaaccgacatcaatgaggccgggcttcatatcgcggcagacgtacttaaccgagattgttaacaccagggtttataaggtatatattcggagattggatcttcggatctggactatgagtacataccttgccgccgaagcagtagccaacagcgccgatcttcttcacgccgagagtctcgcgggcgtacttaatagtcgactcgatagcgggctcgacgtgctcgggctggtggcttttaatccatgtgggcaggacaaccttgccagatgacatgtcgctgacactgatctggtcgccctggagaatatccggaatgatggtcaggtagccattgttggcgaactcgtcggcgaggatctgggcgttgatgtagatgccgaagatatcggtcaggaagataatggccttctcgggggacttgtccttagggtaggagatataggtgttgactagagaacggcttggttaacaattatggttgcggggggttttggctgcaacgagtatcttacctccgtcgatattcttgatctcaccagcgggagtaccttcatgcttgaaaccagaggcacagcaggcagcgggagggttagaagccatttttggaattttgaagtgagaatgggtatagaaagtgaaaatgagggttttccaagtccgtgtacgtcaaactgtagagccctgagggtaccccactgcttataaatgtatcccgggggcgtacaatgtccaacctaagcctttcagccatttcaagccatttccacaagacgttatgttctgccaatcagactggctgttcagttgcgtctttgtcttctgactccacttgcccctcgtggagctatcagacgtcttggacccctttgaccgttaatgagctctgccttgggctgatcctccagaactgaggctcaatgatctcgcatagaccttgcatgcctcgttatatgtctttttcccaatccagaattcaattgtgtggcaggagagaatctgattgaatgtgctcggcactcggcacgacgaaggctcgggggtaagttgctaactccgtatatccactccaacgactccaacatgggtacggagtaaaatgaaacttgtttaaagagataacattgcattcatagaaatatctgtactgcatatatctggaagactaggacagccagtctcaatcccaccactattaccacattagtccattcacacattgaacgtcacaaaaaaaaaatatcatgtccgagggtttttccaaggaactatccttcccaaggtatctctgcaaggaatattatgtcgcataagcatgcaccagtaaaatgactccgtatattccagcatgaaacaaaaacctcagaagtgtaaaagggggtatcaaagcaaacatgtcgccgaattttcactggaagcggaagtttggccgtgagcgctgggcacgcttcacagcccaggccttgatggcaattgtcaagatttcataggccatgatgaaagcactgaagcccaggccgacggtgaaggtgaacattgcgtccagttcatagtactccatcgcttcaatcacattgcgggtctagatcaacgttagtcatgctcttgggtgacattgtaaaccttaaaaagggtccaaggttagatatgcacttacgctcatcatgaaaatcagacctcccgagatcagacagaacgcagcaatgatctctgtcgggggacgagccgggaggtacgaggtcggaggcttgaggtacagcagaacgtatgtcatgccgcgcgccagtgcaaaaccaaccagcatgttaccccattgcttgtgcaccatggtcgatgtcatgctagtctggtggtgcgaccccatcatcatgccaagcaacataatgactagggctggcatggggttcaaggaaacgccctgcgacctcggtggggtccaagcttcattcgaagcatcatgtgcagggatttcgaggatggtcttgttgacccagtcacggacgcgagtagattcgaaaagcataccggcctatttaaggttagccaatcaattcctatgaagagcgggaaaaagaaagatgaatacgtaccagaccgccgccgaagaacagtacggaaatcgaaacgtgctcaagatcggtagcagaccatgccttgcccgcattggagaggtgctcgaggaaaacatttgtcgcgccatataggaaaataacgaacgactctgttgcttcacccgagggaaccttggatttccatccaacgatagaggccgacggcttcttgttccaggcccagcccagatctgcccagcaaccaatatagcgtccgagggtcaggataccgtaccagaagaagataccacccttgatgaagtgcgcaagcccgttgaagatctcacgatccctcatgatgccaccataagtcacagccccagtcgcaatagccgtgaatccgaatggaagaatgacacggtcaacgacgttatacacgacgttcaagacgcggagaacccggctgggcatcagaccagggagagtctttgacaggaagcgaccaacagccgtgtgacgtatccagctgctttgaacggtaaccttcgctggcagttcctcgggcttttcaaatccatcgtattcggtaggcgacccgcatgatgacccagggctacggatagaagacgagttactatccgtaccttggccactgtcgcgagaccagcgacgctcgcgcatcgcaccattgaggcaagcatgctcagtatcatcgtcagtcgcgacaggcaagaacgtagcgtgttcataagagggcgaattcgacttgccgcggccagcataggcaaagagcaaagcgaggacgacctgggcactgacaacacacgtcgcgatccagccgattttgtggtgtgcgttgttctcgtagaggtctggtgtctggttgttatagataaccccgagtaggacgccgaacgcgttgaagcccagaaagaggaattgcgatggaagtgcgagccatgagcgggcaatgctcagcatgacagctatttgagggatcaggttctgtccgttttctttttttcgcgctcggtgcgcaacacgggaagccacttaccaacaggaagaacgaagcaccaccccagaaccatgagggcaatgtgagctatgatggtgctggagtgcttgctgtatgcaaaatagctcatgggaccatcggtggtagcttgtgtcgcggtggtggtaggttgcggcgcgttggtgcccgcgttcatatccatccccatgtccatagattcatcgtcaccgtgcggaatggcggtcgcaagcgatgcgagaaagagagtgaaagttgccactaatgcgacccgagtagctaaaggcatcgggaagaagatgtgctatagtgcaaggaaatggtattgtgtctgtatgtgcagaaatgcaagtgcgaagtatagagctccaacctgaggtcgaagctctatgggaatcgtgacgtagcaaacctgtcaaaccggtaactagacccgtatttattcttgttttcttttttatgctcctccaagtataatagacacagtacttggagacagatgaactagactgttcgatttgggagaagctgtagggctgaagtatgaaagggagggaattgcagtattataagtccaggcggggccaggaatgaccgggaaactgctcacggaattaaaaaattaaattggaagaaaattaaataaataaaaaagagctcgccggtgctgatttccaatgcttttggaatcttaaggaaaaagaaaaaaaaaattaataattaaaaaaaaggagtgcgtggaagaaagcccctcgaggccgatctacgtccaatccacctcgttcctgtatagatagatgcacatgagcacatacataactaggtatgatattcttcggtgcttaaactttgaaagtgtcacgaactagttacgctggattatacgaatgaagctaaggttctatcatttcctttttaccaaatgtcttatatatccctcgtcttttcactcgggtgtttcgggagcctcttggatgtgtggatttgtggattttggtgacttcacgagttggggaggttgggaactatgactacatagaactccaatattggaatatttgggacttttgcgactgaaaattatgtacgccgtactccgtacctaggtatgtaaacctgcatctgatgccacatgtgttatacgacagacagaaatatagtgtcttggccaatgacgtagtcgatcgttactctatctggacggcgactggtctgattttctcattttcctattacatccattcgatgtatacccaggtagatatataaaaagtgtcatagagtataggattaaccatgtaaatatgcttgcttggctcacaggccaactatatcaggtttggtttccagggccccaaggtgtcaagccttaccgccgttcaagcagatgatcatcaggaatctactcctccaatcaccgaagcctacaacatacgcaagtacttatgcattccttgtcaggtgctaaacctgctttcatatacttcatgctatccctgtctcggccccctcgctttgttatccgagccgcaattttcgggctggccccatcttggtgggggctatacaacagagtctgatggacgctgacttgcaaccagacgaattcgatcggaagttcggcacttccatttattacccaaacaggtgatattgaggtagttgcctcaagtagtagcccgctcccaaggttgtctcccgtggatactccgaacgtaagatcgcgttctggtccttgcaccgatagacaaatttgcacctcatgaaatagtacggagtactatgtaaagaaaagaaaaagctgatcgacccaagccaccaatatgaacacatacccgatgcatgtcgtcatgtggttacctaaccaccttggtcccctcagtgctgtacaactttgacactaccaatagcctcgccaagcgcccaagctatactccgtattccgtcctccatactccgtgcttcgactctacagacgccgtgaacaatcatcccccagtagtaaagaagcaaacgagcacctgacaaaagtcgggccaagaccgagcccgagcccgaccttggcgattggtgaaccggcatccgtgagcatccggagacatgaaaaaggctgggctgttacatccacgcacctgcacgtccctaggatctgcgttgaataaattgctaatctgttaaggccagttcttacccggaatgcaaactccgttttacctccgggccccgagcccaattacatccgtatgctccgtcgcctccgccctcgtgtttctaaccagtacgaagtgcaggcgagccggctgtcatatgactcatgcttcgcataaccttaagctactgctctatacggtctgatttgcaatctcggtggttgactgctgtctaacgccgtggtatcccacatacatatatgtacctccatacccataatcagacgatatgacctggcgccacactgtgcaatatatgctgggatcaagtcttcggcacgtcgatagctccaaagaaacattgccaagttgagaaaacttttactgagtaatcggaagtccggcacaaatactatccgcacaccggctctgatctagccgttccccaggggtaataataataacgggcgaccaatgaacatagtgtgaatacctccagatcccgtgtgatagactagacatgggtgaaggtattgggcacggacatgaatataatcgaatgtagttagggattgactagaagcattgtcgggctcgaagtataaggcgctaacccgcatcgcatacacgatgtcgctagcgttcccggatccagggcgaggactgaggattagcgcgttcgcctacctatctcgttatccagcctatagctagttatagaacatcggaaaatatttgtttttccccctgttttaggtctggttatttctggttattcttagaaagcttacgtcgaattactatgttctaaaatatgtcccttgattttaacccggaatcaatccatttcttaggctaagatcagtccctattctcttccaattctgcatgcattggtcaaaacgccatgggtgattagtaggatctccatttctagtgttttggctgctctgtagaacagatcctggctagtgactagaaggacctcgaaaacatttcgaaaaggtatccaagaaggcatctgaagacacatgtagaaatatacctgaaaagaaacattgaagatatctaggccatctgaaatgatgtagaacttcgttcatcacaactaattatgcctgcatactaactagataatagagtaaatctaaactcattttcggtgttatagctcaaaaggagtatcttagctataagagtcccgccaataataggaataacggaatatatataccaggcttatcaatctaccaagtagaatagttagttaactagttataactagttatcggcagtagaagacctgaatgccgaggcataaacaaatggaactggtacctagctacaggttgaacattatatccaccattatcaggaatgcaatcatccaagggtagtgtcctgtaatatggaaatgactatctgccttgctagtggggccgtaagagccctataacgcatgggccgtcaacttgattgtctatccagccagggcaccaatatacctcgaagcagaagggaccaggtatatatctgatctgctggcatctaaagccactacaaggaattcgcaggctcatgtatcattaatacacctgaagagcctcacccagccaaacatgaaaagctacaccaaacccaggtacaagaccgtgcaaaagcacgcccttgcccacatccagaccacaagcaagtcgtacagcaagccggagcaagaatgattcccagagaaaaattccgtcattgaaattgttaagaaaaaaccaggatgagggaaatgacataaatcctcgtttttcagacactccacgcaacaaccccaaatcctcccctcggagccaagatctggtttgattcgcaaccccgagacaccggacacgcaggcccgatgtctattcctccattcacaaaaacatcaaagacgccatttttgggctcgtctgaaacattgctccactggacgctaccgtagtcgagccgggtgcgtagatggatttcgtggatgcgaacggttcgagaggagggagtcagttctttttcttcgcttaacggtactgtaggttgaaactcgtggttagtgttgtgcttttgcagtgtgaatgtgtggtggtagtgatggtagtggtgattgcaaattctcgattgtcggttgtcgattggattttcatgtcggaaaatatggttgtgtggtgttcgaatagaatcggataggactgtcgagcgaggaattgaaacgaaccttggagaaaccgatgtcggtggacttctcacggaagcactgacggcagatgttcatctaaaaccatccgtattagccacatatgtccatgtcatgccacatattgcaatacgcaatatgttcgagggatggtttctccttacgccgtacttgcggatcagaccggcgcggtgggagcagacacggctgaaggcgcacaaatattagcaagcccgttccttctgtatcgattttcgattccatccagctctcctccgatgttcattctcggtgtcgactggatcgttcatcgggggattgtagtagggtaaacacaccattcgcgggagcccttgccgtacctatcgagagagaaattccggttagcattgtcgctctttttcgagatcgtgcctggtgtgtgcgtgcggttttcgacttacttgcggggccggctgtaccaaacgctctcgtgagtcatcttgaggttttaaaggcgggacctgggagttgacggggttgttgacgggacgagggtcgctggcgttgggcgttaagaacggagacaagagttagggttggaatttgcgttgtgtgctgccccaatggggaatagggcacggaccaactcgcttgggttgcgctagctttttttggtggatcacgtgaccaatgggcgatcaccacatcttggagcctcaggctgccagatcttatacctcaattatttcaaggttatgtctttacctgacttgtctttggaagggtgccattggtatgtattggagcttaaatacaatttctttggaattgtaagatcacaaagagacacttattaaaaaaagaaatctttcaatggctacttcattagagaggtcgcataagtggctgtatattgggatagagttgaacagtcttttgtcctcttgagaataggtgtacattgtgctgagacatataccttgtttctgaggctccactaactatacacctgggcagttagctctagtcgttgttaagaatacaaattccttcttctttcctcttcccttgtcgcctggtaaggtcatctcattttatctgaatatcttcacccaattcacatcggcgaaccagtcccgatgaaaactccaacctatcctcaacgggacacactttaggctttctctccagattacagaagccaaataggagcctggtggtctggttgactggcgtgttggaagggattctgcaaattcatagtgttcggaaccgcaaacagatgaagtccaaagacaaagagagactggtcttcaagttattcgaactggtggaacttgttgtttccagcttcgattgcagcactgtagaaaccgctccaatatctggggaaggatatagaaattcaagtgcgcaaagttcacatcatcaagagcaggtgacatcccgttgaaatccaagtctctcaggtccactactactagcttaatccagaaataatttttagtccaactctacaacagtacagcataatgttagtatatgcaaaggaatgaagtggcaaccggcgtatgaaacttattaattgaactagtctgtgcataaggaatttacttctttgtcttctcggcccggagataacgagcgctgtaaaacaggagataggcatcctggcggaggacttcagccacaccggcgatggtgaccttgttgtcatccatcagtacccactaaaaaggtaagtcgttagcaaagcacaggcacaaaggggaatatgtcatgtattagaacgaaccttgtcgttttcaatacgggtgtaggcgtagtaatgtccagagtccattgtcccttggtggacgatgacagtagacaagtcgtaaatgtaattcgacatgtcgacagggaggctatcctttctgacggtgtaaggcaacatgttcacagacaaagggaagtcgatgtggccgttcattttctcggatgagttagaggagtgttcgtagcgctacacgagtcagcacgggatcttaattcaagacagtcaggaaatccaacaaaccttcagttgcatgcaaagcataacagggagtttgcggatctgcagacgcttcgaagcccgctgcggggtgttaccacacttctcgcagtggtaagcagcatcggcgtggagatcttcagcggcagtgaagctgtccaggcagccgaggagggttccagaagtagaagaagaagtagagcgaccgagcttgcgcttcttttgctgaagctgtacatcaagactgagatcggccatggggtcgtgggtgttggtggtttggccacatttgtggcacatgacgctgctgcgcagttcgccgtagaacatctgatggaagaagcactcgcatggtttatcgtagctctccacgtgtccgggagtagatgagtgcagttcattgacaaggaattggaagtattcgtgggcgtcttgctggcggtatccacgcatttcctgttgactagttagccagacccgttgtacaactcggaactcgacgtaccttggatttctgccaaccatggtgaagaagcacggctgcggaaactgcctcgcttttctcagcgctgttgaattccatgaagacttcagctgtcgcacaggcgagacagtccttgattatgcatgtgtggacgtcatggccacctcccaagaaataggcagtgaggctagggtcgtgcaacagagcctgcaaaatagaagcttgatagcacgtttgacccatgttccagacaccacgagcaccgcggatggcgcaagggttcttgtaagcattgttcttgacgtagacctcggaggcagagtcttcagcccaaatggatcgtccatctaccagaagttagtagaggtgcttgggttggataacttggaattgtctgggactcaccaatggcttcaaacctgccagaagggccacggagtctgtccaatgtgtgatcatagatgaaatccacacacttctcacaaaagacaaagcggttgcgtgactccatatctgccgttgtgtaagtatgataacgacgtgatcagtccgaagccgttggcttacaaaatacatgtccagtcgccgcagtatgttccgctcgcttggaacccagacatacttctgcacaactcaaacagtgatacttcggcttgagggatgccacagtgcggaggccggtggttggaacagcaaccgtttctgtttttgagaacggagctagcaatttgtattgcctgcagaattcctctctgaactggtcagcagtcttctcgtccttggagagaatagccgcaagatgtactagcgggatgtcagctaggcacaaacgagccacggcaattgccaattcttaccacagccaaatgctgcttcagaaagaagctggacggaatcgagagttgccatagtgagcgacatgagtatagagtaaaagagatagggtggaagggagaatgttaaggtcagaagcacgatgcaaggatacgtagtaaaacacgttaatagaagttccagacttctatccacgtggagacaagaggttgaaagagagtattcaagggagaaaaaggctggttataaagagaccaggtacagcctcaaggactcttcctgagtagggccagcattgcactctggaaacaattcgtatcaataatacgatgaatcagagcgtaacagaacaataggactcacgaaagcaagtgaatagggacaatagcagacgaacggagggaagctatacagcccacaaagggttgtgaatgatctgattcgacgtcacaaccagaatttggataataagacttcaacagcaatgaatataaatataaacgtttatccaatagacggggtgtattccctgaggctcttcaaaagtcgtggggaggttggtttgccatcgggcggtggtttttcgcctgaccccgatttaccgatttaccgccggataagagatcggacactccaaatggcagaaggaggcctttgcccttttcttttttttctttagagaagtattttatttcgtatttatgtatatagcgttggttttaatgctatgcaaaagaggtgatatggtatagtttcgttcaatggtcatttctagtcataatgaaaggtaggtagatgtgctagcccattgcaggtgaaagctataggtaaaggtccacaggcccagctcttggatgccaatagttaaacatgtagcatgaattgattgttcataattaggccattctaagcactcaggcatccggctctttaccgagtcccagtccctctaccccgaggaagtgcgctgggacgagcgccgcgcgcagtgcctcgtgtagtgtaccggctggttgctgtaccacgggcagtgccacgcgacggtactcgtgagcccgcagcgtacttggacgtcggtctagaggagggggtggtggtgcttgaggggttctccacaaatgttgtgtccgtagtcctgtagcgttggaacccattagctcaagtttcctataggggatttgtcgcaagtttctctagactcacataaaggtcatctcgccgtcgtcaatcggtcgtgttggttctgattccgcttctggatggctgttaacaaacccggttcgccgcacctaagtagttccgaaagagagccctcgcaatacctttttcttcttcttcatcttgcttagcctttttgaacgagtctggaatcggcgcctgcattgaacgaatcagcaaccctgtcgcgcgctgtcaccactgccacaactgtcggcgacgcgtttgcgaccatacctctgggaaatccacacaaaatgcattcatattcaacccgtagaggaaactggcaaaactctcactgaatcgcgtcaagctctcgtgcatcagctgcaaatgcatgaagttggcctccaggtccgccatcgaatcggccaactcggcgaactgcggctccaatgcattgatggcaggctgactgtatcctgaatttccaatgccattcccatatccatgggcctcccgtaatgaagagcgcgagctgggtcgtagaggggttgtgggcctggatgagggtctcgggcgcgtggatgattgaggtgcatccatgtctgtgatgtatttgagaatgcgaccggcgggattatcgactagagataatggctcgaggatgtttggcgttgttattggcagtggatggttgtcagagtgatgttgagcgggttgtgtttgggactgttgatctctccccggaaagatctctcacgcgacacttttatacttgcaactttgaggtgagcactgggttgagtaatatatacattagatggattcgaactagatagaaagtaacacctcgaattaatttaccataaactatataccttttagggatgatcttccccgcatcgtcatatccttgattccgctctcgcattttcctccctcgcagggctaagacctagtgctcactcataccaacatatcacctcaattacactgcttatgcgcggaacaatcctacgccgtctctatccttcggctcggttccctgtcgctcggtattcattcgcgcgaccattctccacacacccagaaccaaagaaggcttcatctttttggacccttacatttactctcgctgtcgtcggaggaggcgcttggctccagaacagatacttcaatcccaaagatacaatcacttcgcagccccagctccctcaaaaactctccctcggagtaatcgataccctcgcgacgatgcccggcgaacccgcccccggaacagtcgggaacctcactccagagcaagaagtcaagctgaaggaattctgggtcctgacactcaaagtcttcggccttacactcgacgaactcgaagcaccaccgtccacagccaccagcgatgccgcaacacccgccccagcccaggataagaagaagcccaagagccggtgggggatttggggccgcgcggacgacgacgactcgaaaagcggctccagcagcgccactgccagcgtggcttcaatcagcgtcggcgacggcgacgacaagtacggccagtccaaggagttcaagcaggcgctggaggacatgaagcccgaggaaatccggacagccttctggagcatggtgaagggcgataacccggatgcgctgttgctgcggttcctgcgggcgcgcaagtgggataccaagaaggcgcttgttatgttgatttccacgatgcgctggcgactgctggaaatgcatgtcgacgacgatatcatgttcaacggtgaggcgtcggccgtgaagatgtcgcagagctctgatcccaaagagaagaagaagggtgatgacttcctcacgcagatgcgtctgggtaagagtttcttgcatggtgttgatcgggctggtcggcctatctgtgttgtccgtgtgcgcttgcataaggctggtgatcaggataatgaagggttggaacggtttactgtttataccatcgagactgcacgtttattgcttgcgtcgccagttgagactgcggtaagtaccccagtgtaaggattctgtctcggtagctgactcttgcagactattgtctttgatatgacggacttcggcatggctaacatggtaagcttttcgtctcaaatagtgcacgctatatactgatatctcccaggactatgcccccgtgaagttcatgatcaaatgcttcgaggcgaactatcccgagtctcttggagcagttctcatccacaaggccccttggttgttctcaagttcgtaccctagcgctccataaacgacacccgctctaacaataacccaggcatttggagcgtgatcaagggctggctcgatccagtcgtcgcagcgaaaatccacttcacgaagaaccgccaggatctcgaaaaattcatccactcaaaccagatcatgaaagagctcgaaggcgacgaagactgggaatacaaatacgtcgaggtgccagagaacgagaaccccaagatggccgacaaggaaacgcgggataccctgctggccgagcgccaaaagctcgccaaggagatccaggataccaccgttgagtggatccgcgccagcttcaagaacgagtctgacgctgcctctgctgctgagcaaaagcggaatggcttgatcgatcagctgcgtaagcattactgggttcttgacccttacgtccgcgctcgctcgctttacgacagactcaatatcgttcagggcggtgggaagattaacttctatcctgactcgcagaaggaatctgggagcacagcagcatgagtcgtgtggggtacatgagttaggtggtttgattttgatttccaagcttaccagctagatatttagagtctggtttttgcatgtttgtaacatacagacttggttgttaactagagggtatacagacattttggtatatacccaacggagcagagtcctgatgggagtagatcaaatgactatgttctacttacaagtttctatcaccttcatctactcaaatgaatactacgatccttcttctgcagaaagagatgtatccgtggacggtccagcatagtatcaactcggttaccattactcttgagttcgttgtcatccaaaccaaagctgtttacatcttcgacttgatctcctcgtgaagagccttgagcttggccatatcggcctgctcggcaggccagccaatggtcaaaccctccttctcgttgggcttggggatctatcgtcctgttagtgtgtgttccatgaggcagtttctagcataaggccaaatattcaaaagataatagaacataccatgtggaagtggacctattaaagaggactgattagcacccggcacgattattagagatcctcaactgaaactcacatgatcaacgacctggtgcgcaatgcgtccattgttctgcaggacattgaaatcttcggcgccgatggccttggcaatcttcttcgcgacgggctggggacctcctggttagctatgtccctgttcgccaatccaattccgggtctctgagggaccttgcgaggtcgcccccaaggtcctcaaagcaatgtaatcaaattcaatcaaaaccgaaaggacgttgactctcatcttcatcctcttcatcttcctgggttctctcgtcgacttaccaggacctcagttaagtgctcatcggggatatcagtcagctttgcgccgtggaacttaggaatgacaagctgtacatattgtcagtttgatttgatcttctctttcatcaattatcggtcttggattgctggctgaagttatcaccgcagttgtggtgacttcactggcgcccccagggatacgtcggatgcggggaagaggaatcgaatcgtagggaataatacgcaccgcatggccgagactcagcggctggatatcgaggaaagcgaagactttgtcgctctcgaagagcttcaatgaagggatatctcctgtatagcgcaaggaagcacgtcagtcaatccatattttgctacgtgttgcatgggcatttgcgatagaaatgtatgaatgtgtagatatggtggtaaaatggtagtacatacccttgatgatcttgcagaagatacaggcagcagatgacattttgtagagctttaaaggatgatgaatgatcttcaagttgaagctgacgttaaatgcaaaataataattccttcactatgcggggtcaacaaaaatgcaaatgaattaattacctggtcggttcgaactccgaccgtttccatgtccgaggcggtggccaaaatagtagggggggttattataaagtaaaaaagagcaaagacacccgaggagtgggacaagttagtgcagaacccatttcttgccttttaccagagatggccgtgatttgcccaccaaactcctctcatcaatctttggaaacacaatgacacagctgtcattttttttcttttgtacctttcttatacatgtcttcttaattcttttagtggaattatagatttgcaagtttttgggaattgatgtcggtgtggtagatcatatatgagagtgcgtggatgtatatatagtatcgcgcaaggttgtatcatgctcttaatacattctatgtcggaatatcagatgggttgctttgcttttttatggctacttaatgtgcctccacagtgatacatgccaccataaccctgtccaagagtagaaagtaaatggctgtatgaggattctcattccctatgtatggcattgctgatctagaagtgactatgctgttgatttgcaactatcacagcttctgttcttaccatattccctacctaggatgctataaatagctatttgtatggtttcaactccatatgccgtagttccctccatgcaacaggtctaaagccggttggcgagacatctagaacagccctggtacctacctaggtaggtataagtgaactgaataataatggcctaacataaacttaagaggaataccaagtacaaaactagggctgattcaatggccatgacttaattgcatataactagaagaacataatgtatagacatgaatagttaaggccggggaatgtccaatcacagtccaggtgttgtcagatcaaaacgggaattccctcctacggagggtgtaggtatagaagaccatcgatttcgcttaatatactaacttgacatatactaaacagccaggagccatcatatcagccgctccaagcaacgaaacgagagaaagacgagaaaagcgatttgttaaagtggtggtccgtatttccgaatcaggactagcgccagagttccgtgcggttcttccgacttgacgctgcgaaagaccctcgcacatcaccacgcccttcttggcaacactccgctccaattcgctggtgtcgagagatatacccagccagagaccatgcagaagtctcgcaccatcaacactgccctgggggcccggccctttgtgccagtcccgcgggttcagcttcaattccagcgcaaccttcaggatgtccgcatcacccggactggcaagcccctcttgaaggtccaaggtggccggtaagtgatcaattgtgctgtaggcctattgttcctgcttgttgacgtgattttctcatagttcttccattggaggtagctacgcctttccattttgatgctacgccccggtccggatatgctcacacaattctaggtcacaccgcgacggtttttggtgccactggtttcctcggccgctacattgtcaacaagctcggtaggttgagagtgctgcactgcagttggatcatggactaatggcctgcagctcgccagggatgcaccgttgtcgttccctaccgtgaggagatggctaagagacacttgaaggtcactggtgatcttggacgagttgtcttcatggtatggaatcttgctgtcgcatattctgtctgaattgtggatagtgcctgacctctgcataggaatacgacctgcgcaacactcagtccatcgaggagagcgttcgtcactccgatgtcgtctacaaccttgtcggtcgccaatatcccaccaagtgagttacagtgcgtgatacgcatgaatatgtggtttctgacgaccccaggaacttctcctacgaggacgtccacgtcgacggtgtcgaacgtattgccgatgctgttgccaagtacgacgtcgaccgcttcatccacgtttcctcttacaacgctcgccgtgactcgccttccgagtacttcgccaccaaggtcagcatatctactgggactatacaagaatgggagtgctgatgacatataggcatggggtgaggagatcgtccgcaagatctaccccgagaccacaatcgtgcgacctgcacccatgttcggtttcgaggacaacctgctccacaagctggccaaggtgggcaacgttttcaccgccaaccacatgcaggagcgctactggccggtccacgtaagttatcctcccggggtggacaagctgcattgaactaaccctgtctaggccatcgatgtcggttccgctctggagcgtatgctgcacgatgacagcaccgccggcgaaaccttcgagttgtacggtcccaagaattactccactgccgagatcgccgagttggtcgaccgtgaaatcatcaagaagcgccgtcacatcaacgtccccaaggctgtcctcaagcccttcgcccactacatgaacaagttcctgtggtggcacaccctgtccgccgacgaggtggagcgcgagttcatcgaccaggtgatcgacccgacagccaagaccttcaaggacctgggcatggaggagaccgccgatctggccaacttgaccttccactacctgcagggctaccgtagtgcctcttactacgatctgcctccctccacggagcgcgagcgccaggaggacaagcgatacctgcatgtgctggacgaccagtagtctgtgtttttaatgtgtaaataagccttcctagactcaaattcgatttccttgtgttggacggtgcagtgtattcaatgcagaccagtatacaagaccataaactaaagggaacttttgtaagacccattgcgttcctggaataagagtgagatactgtagattcaaagttacagctatgatctgaaggatagtacctgcctgtgtacctgcctcttcatatgtatgtaggtatatgagtaaaccaacctcccgtagaggttaggcctgtaactcatacaatatctcatacaatatctcatacgcgtgccaaaatggctgcttttccactggtaattttgatgtccagccgctccttgacggcccactgccctgtaacaccgcatgctcggcatgggctgggaggtgattgcacagcaacgatagagctgacgttggtgtttcttaaaaacattgacaaatcgaataaggaaatcaacgtcgtgggagttctccacgaagacctttctgggaccattcttctatggctcattcatcgacttcctgacattctatactgaggtctatacgccttctttatatctaagttgctctatatacacccctaatcagccccaaaccttccttcctccaaaccatgtctctttaaccttagcttccaacaatgcatttgcatcccattccatatcaacaacaacaaagtccgccaatttcccaacacccaagcttccagtcctctcttcagcgaaaacacttcgtgctgcaccctcacttgcagcaacaatagactcacacatccccagacggaaatgctcattcacaaccttggtatacttaacgtttctagccgactttcgcgtggtagccacgtaaaggttgtccataggagcccaaggcgaggtagggctatcacttccgatcgccacgagagccccagcatccgcgaattcgcgatatgcaaacgccctcttgcagcgcttctctccaataaggcggggccactcggtgagaatggagggatcagcatgcacaggctggatagacgctgttagaccgagttctcccagcctctttgcatccttgggagatgcaagttcaaggtgttcgatgcggtgacgtctccctggactcgcattcttttcaattgcatcaatcgccattgtgattgctccatccccgattgcatgaagggctatttgaaggcccgcgctgtctgcttccttgacaacgggagctagatgctcggcttcccaaatgggcgggggtgaaccaaggggggcatatggctcggacaagaaagcagtgcaagcgtcaatgatcccatcgcagataatcttaataccgacgatccgaaggtccggactggtactggaattgtaccgtccactcaattcaattgcacgctgtacctgctttgagttggattcggggtctgccgtcggtctgatgagccagtatgcggcaacgcgcatggggagatctggttgcgtcgagcggagagtaacaaggctactccatgcttcttcgtccatagccatcactacaacgccggtatatcctgcggcattatattcttgaattgcttggagaatcgaccgcatgcgctcttccttgctcgatgacactgcttgaaatggccagatgactgacatcatagcaccttcgtccatgacaccagaaggttttccctcggcatcacgatgtatactaccaccggggggatctgacatagtctccgcaccgagcacctgcagagcggcggtgttcatccagcatgagtgctgcgagcttgcatcgatgaagataggtcgtggatcaatgtcatccagcatcgcggcggtaacaccaccgggcgtcatggaatgcatccagttcttgcagaaaatagtcggggcatctgggttggcgaccacgtactgcttgatggtggatcggatttcctctagagacttgcagtgtcggaggtcgagtttgcgaagtgattgcccaagaagtaaaagatgcatatggccatcgataaagcttggaaggacagtctgctgcttgaggtctcgcttttccacgtcggatggacattcagaggaaagttcttggaattgtccgactgcagtgacagttccgttccttaccagcatgctgtctgcaaacgtgggctctccaaacagaccggagccagctttggtgaggatacggccattgaagaagatggtgcctttatccatgttttttcgagatgtggttgagctgtatgtcggggtgtttaacaatggctaaggggaaacgtacaaagtatgaattaaatcagataagttatattaaatacttcgggctatacaaaatcttggaatataatatgcaacagtcattcagtacggttcgactatagtcccgtcttcgggccaacgctgggaaattgtgtcgggtcgacctgccctctcctaatccgtagcgcccggctcgacttgccctgtttcaattgtaagaacatcgagataattacatacctccattgatacattgttgtatacataaaagatacatcttattgcaaacattacttggctacaatgctacagttgttcgcgaatggagtatgcacatgttgggaactcatttcgtccagctgctaccatgactgttttcgcattggcgttgaggtcatatcttcatatctgggctattgcctcataatagttgatgggataaaccatcgcttttacttcaagatcttcgctgtttacgggcatggattccattgctacctaggtatatcataagataacataagacccacagtcaggaggggccccaatcacccgggatatttcactgatctcttcccacccccacgagaaggctgtgcgataccactgataatccgcatgagcgccatatcaatcggctgctggacctgccgggtacggcacaagaaatgcgacataacgacaccattctgcagggaatgcagtgatcgaaacgtccattgtcatggatatggaccgaagccagcatggatggatggagcatcagaagaaaagaaagaaagagcgcgaatcaagttggcgattaatcaacatgtccgacgagttcgaaaaatgcagaatcgcgccaagagaagaacatcaccgcctcagggacttaaggaaatgcaacctgcagattcccaagttaatgcctcgactgccttggataccggtgactcgaatctcgtgcaagatacttcattggaaagcgtagatcgaccttcgagccaagatggcatttttgacccccaagctgcatgtctattgatgcattatcttgatcaggtttttccatggcaattcccctatttccgctccacatcccgattaggaaatcgaggctggcttttatatcttctcatgaaacgagggcctctctaccatgccgtcttgagcctttcttcgcttcaccagagtgccatccttgggagtgaagaggaatatcaacaaaaggaaaaggccctggaacatcattccagggcgctccgtgagttctgcaaattcatgagtgaggagcgtgggaaattgctggacgataatgctcggctggccgagttcttggcgtgtagtttgattctgattagctgtgaggtatggacctggcgatctttcaatcatctctcaactcacgaagaatctaggtttttagaggcgctgaacacaactggctattacatctggatgctgtcatatgtgtcatacattcactatcgcctgagactgtatttgacgctcgctacacatctcatgcgggttcttctgttttatcacacaatcgcccaaaggagggtcttgagttccttctcgccacaatggtttcacttgatcttttcgcctgtctcccgacgggacgggtaccacggcttctgtatcagcaatggctccgtacatctgaaatacaagtcgcagatctattgagctgcgaaaactgggttatggtcatcatcggagatctagcatgtctcggggaatggaaggaggttcaagaaaaggacggtatgctcagtattagtgagctagccagaagaggagaagagatcaaggaacgtttaactatgggcattgagaagctcgttctgactagggatgtaagtactaagcactcatgtctcgcagggtattaacgttgaacgtccaggcacaagaaaaccacgaagcacaaactagctgggtcacacttctcttcgcccttgcttgcgtcgttctgctgcacacaattgtttccgggcccctccccgcactaccagagattcagagcgcggtttctagaagcattattgcgcttcagaatagaccgaggacctactctctcactggcttggtatgggcactgtgtgtattgggatgcatggcacagccaccgaatcagctattgtttgagaatctcatggccagcgtggtccgcgattctgcggggtttggtaattgcggtacggtgttgaaaataatgagaaattgttggaaactccaggaaaccgggcgtgcagactgcagaatcacgatggcgaagatgaatatatgtgctatactgatataggttttctggttctgatatttccagcattgtgataatattgtctctccattttgattgatgttgtatctcatcttaaaatcaactcaaggtagggcacaacgctaacacccagggggattaggagatgtaaatattgctgatcaagaccttttgtcccctatatgtgcatccatacttcatattgtatgaagtagtgtccagtctgaacactactgtagacaagaacctaagccgccgaaaagggaattcataggtcctctgtttatagtattggtattgacatttcgagtagagtgatagtatataatttgctggacagaatttgctagtgaaaatacgataaagcctggcaaactgttgctactgtatcgttgaaatccatatactggcaacgcaatcactgcccagcgctacaggaaaacggtctacttatagaaccggttcggaatgcagtaatctgttaatcagtacggcacaatcttttccatcaggaagggagaactcacaactccgacaacgcttgcataaaggccgcatccaagaatacaaataccaacaaggaacacgattaggttcagaattgcatggcggatattgcgcttctcgtgccatcttccctccttcagaagaaagaaccacatgactggaggaacataaaatgagaatccagaaacaaggagacagccacagatagcgagtagttcagagaagaatggaatagcctctgctatgatccatgctaagatagtaatgatggcaacacttgacaaccaagtcacccatcccttcgtagtgttcacgtaacggacaacggagttttgatacatcctgccgtgaatatagcgacaggcaacggttgtgttgatagacccagagataaaaatcactggtagggcaacaccaaatgcaaccttggcccaaaggggaccggcagataccaatgctggagagccaacgtcctgtccgacaaacgcataaatgatggcccctgtcaatgtgtagatagtcacctgcactattcccaacgtagatatggacttggtgaaatcttcgggggtatgcatctcatccataaaggatggctgtgaggcagcgaaggcgtaagcgaaggcgatattcgagatggccacaaaagccttgctcaagttcaagtcgtcttggggccatgcagaccaaggggttgcggcgggatcctgttgaacaccgtttgcgatgatacagattccaatggcgatgatgatagagccgaagtcgatgaatcccaatatcgaaagctcggcaaatgacggcggtatagcaaatgcaaaaagaataactgcagaaatagcactgaatatgagagcacatgcagcgttgtctgagagtgtggcgaaggccagctttcctgtcaggcaatgcgaccccactgtcaaggtcatcaatgcaatgaatgccacgctgaagagtttgtccccaaagcctcccatcaagagacggccaaaatcgacatagtgggcaacatgtggatatttgagctttgccaacccgaccatgtagcttgcataaatggcgatgagacccagcccaatgcacaggatgactcctgccaccatgcctagtgttgcgaacgccgcaggaaggctcagactacccaaggcgattgattgaacaatgagcacaattgtgagacgcttccagccaaggcgatggaagtgctcgttgccctggatggctagttcatgatcgtggtatcgaccactttcactgacaacttcaccgccgtatttctcgtagtcaatcatatcgtgtgtgtcctttttgtcggtcgtgttggcattggcattattggcgaaggacatagtggtagatagagcaagaagggaaatggtcaatgaagaggcaaagccaattgctgagattcgaaaacgagtgacactatcttaactgaatacgattttatatcattttgttctccgttctccatatctttccggggtcacagtatagtgatgggcgttgtggagcttctgtggagctctgggtattctcgggaggaaagtcgagccgggccaagagccaagacctggggaagtggtgcatcaagatatcaagtggacaacttcttgattcggttactaacagatatccccgtcagtcagcgaatctatctctcttatcgcgccagcctcaccagcctgaagccgtcgatcgtgacgccctcgggaaagcccttaagggcaaggatcctgcgtgaaagggaagagaaggatgtgctatgctcaaattgtatatatggccgtactgtagttttgtcttgctttgtcttgttctgtgttggatttgacttaggtcttgtcttgtttctgttggtgtggtccttcaggatgctggtctggtctatctatatacccatggtccgttcccccacggcctcgttggagttttatcctgatttggcattattaatggagttttggagccttggatggttcctacaccctggaaagcaattcattcttttagcaaatgatccttaaaagcaaggtggagagcattttcaatccgtcccataagaaccccctttaagagtccgctgccaccaggacaacttggacttcgatttcgacgagcaaaaaaagcaatttgccaagcggagggcagaggccgaataaaattctctcagcatagattcgaaattttgcctcatttcctgtttttgactctctgggagctcaaagcctcgaaggccgatacagcacttgcactctacagtgcaatggcctctgcctttcttctttttagacagatgcctctgctcacagcatccgcattcccgactacaacatccgcctcgatccgaacaatcctgaaccatttcttcgcgcatataccatttaggatcacgccttaagcgatcgtagggttctttgagtatagagtgaagcctacactccgcttggtaaagggcccactcctttattggatattgcaattgagattcttcaagcgcgattttcgcatcttcgaattgcatcgtattcatattagttccaagagttacagccttttctaaggctataaccttatggtgtagccgttcctcacgctgcattacttcacgtagagcgtgctcggcaacgaataactctgtgagtctagattgatagacgttttctgacccatatctgagaacgctctcatttctactgagggtaaagacaggggggttattgaagaaccccatgaccctacgtagaaagactcgaaggttagtataagtgtaaagtaagaaaggttcaggtatatctatatactagtacctctgtgataggagagactacagatatggattctcaatagagtaaaaatatcaacgaggaacgagatgagatatagaaaagacgttcctatggcttcatcactccgccgcccaaaatagtaactcattatgacacaattacatgtagacagaaagcaaagatctccatgagaagcagaccatgaaaaagataaagagattacatgaataaacaataagggggtttaattagtatacaaacagcaattcctatactataataactagtagcaaatctcccgaggtccctttttataagtcagctcaccattaagtcagcatgccatgtgacttttgctatcagttgggcttatcgccagtgaacgttattcccgtgcacttgatagcatcatatcaatcccataccctcaccttcacaccccaaaccaatttcccatgcctccaacaccaattctcctcctgaaaacaaaatcctccccacacgatggctacgaagacttcttctccgcacacaactacaccccaaccttcatccccgtcctagaacaccgcttcctcaaaaacaacctcacccaagtgcgcgacctattcagcaccggcgcattcaacaatgccaccagaaaatacggcggtctaatcttcaccagccaacgcgcagtcgaaggctttgcgcaaatgatcgaagaagaaaaagacggtacatacacccaacacaacaaacccagaaacacatccaaacccaactaacacaacgccaacccgccagtccaattcaacaccccaacctccccacccttactcctgtacaccgtgggcccagccacagcgcgcacactcacaaccctccgcgataaacacctcccgaatgcaacaatccacggcgcggacacaggcacaggcgagaatctcgcgcatttcatactcagccactatgattccatctacaccacacacaaaccctctctcctttttcttgtcggggaagtgcggagggatatcatcccgaaaacgctaatggataaagcattaccggttgataagcgggttggtgttgaggagctcgttgtgtacgagaccggggtgatggagtcgtttgagggggattttgcggatgttgtaggtaggtcggatggggcggtttgggtggttgttttctcgccgactgggtgtgaggctatgttgagggttcttggtttggggccttttgctggttctggctgtggagatggagctgcagctgggacgcggcaggtctttgttgctactattgggcctacgacgcgggatcatctgcgtgagaaatttgggtttgaggcgcatgtttgtgcacctaagcctagtcctgagggtgtgcttgaggggattgcgaagtttatgggtgggatttgaggggttgatatggatatgggtgggtgtatgtaaatatgtactttgcatgtgtagggtgtatataactaaatgtaggctgggactacaagtatataattgggcattaaagctagcagaggagcagtgcaagtaaattacgaggcaagtcacctgttttgaacactcataatcatatttcgagttgccctgctatctctaacatgtattgaatcacgctgtcaagtgaaagtgcgtgcagaatagaatccaacatcctcctagccaacctaatatcatttgaaaatagtcaagtcagatttaccgcatgatttcctcatagatcaagactagaagcagtcagtaaatataccaatagaagacgagaatcagactcaaaaggtaaactcacgcttcagctgctccttactcagagcatccttgttcttgtcgaaatcgaagaatccatcgggaatgggtggtgcagtgggctcatcttcaggatcatggtacggctcgaggtaggggtgtttcagggcttcctcgacagtgatacgcttagccgggttgaaagcgagcagcttctcgagcaaatccagagccatgtcattgctcttggggaagagtgcacggaagggaatcttcttcttaaaggggagggagcggatgtattcgcgggcacggcgagatttgatgccgtagtaatcttccatcgtgggtgtgccgaggacatccaagatgagggtcaactgatggtgatctgggtgcgtatgttagttatagctattgttgttgctgcttgaagggagaagtggaatcatacaatccttgccagggaagaggggctttccgctcagcatctcagccaatatgcagccgacactccacacgtcaatagccttggtgtattctttgaatgtcaacatgatctccggcgcacggtaccaacgtgtagccacatattctgtcatgaagccggagttgtcgtcggtggaggcggccgagcgagccagaccgaagtcgcagactttcaggtcgcagttggcattgagcaaaagattggagggcttcaaatctcgatggaggacattggccgagtgcattgccttgagcgcacgcagggtctggtagataaagtattggcagtggtcgtctgagagatcttgtgtgcggataacccgatgcatgtctgtttccatcaactcctgcatactgttagtaaagatcggatatatcccatacatgcgcatcttgtcagatggcaagcttcgacgtacttgaatcagataaacttcattgaatccctcgtagttacggggccgttgaatatccaggatggagataatgttttcatggttaaagtatcgcagcaacttcatctcacgcagtgtacgtaggcagaacatggaatgatcgaatggcgtgatcttcttgatggcaaccttctggccggagggcttatgtatggcagagctgcgtggggtcagaggagtcttcacaaaaagtctcgtcctacttaccagacgacaccataggcgccttcgccgataacatcttggatctcgtattgatcggatacattgaaggagatcttccgggatcctcccgcgggagggccttgatgacccatttcgagaatggtttctttggtagtctcagcctttgggtgattgtcagcttcaaaaatccgtgggatccagtggaaaaaaggccgaacacagtccatggggaatcaaacgggaaccgggaattgaaaacagtagagggagggtcgcgcacaatttgccgattcagagtccagggaaagcaactcaatagcacctgaggtcaattgcccaaaaagctcgagcaatttgaccgcaagtacgagcgcgggggaacaaacgcaacgacaacgcacgaaaaccgggaaataaagcttactttcgtctgcgctgcaatcgaattggtgtttcggaaaggcgctcaaactctcgactgggttgggtttgaaaggtcggcgagaactcaggaaataaaaggcgaggtgtagaaaaggtagagggggacttggtcgtacgaagctccgggtggggaagatgtgacaggtacagcgtctagacccaggagaccgaggtgggatgcgaagatcacgggtcaaggtgtctgtcaagttggatcacggtatcaagctcagagcctaagaacgtggcatgttagtggaattgacggtgatgatgctcgggtgcatggagaagatgagccaagacgccgaagcggggtcatcctctgcgggatcacgacgggtcggttggaccgggactcaccttgtctcgccttttctctaccaaggcaaaggaaaatagagaagaaaggagaggaggatgagaagaggtgaacctggagaaacggcgggccgtaggggaagtggtggggcagagagctttgaggcggctccggcaaattggtgaaacaaagtggttcagattcaggaaagggaaattggcgtcaattaagagaggaaaaaaacggggggagactaggaatgacgatcctcgagagcgtagaggaactcgagagagtagagagtgcgtaggtaggtagtagaggtgttttccccctgtctgctttctctggtttgatggacgtggaaccttggatcacttatctccacaaatacatgaggggtacttgtctcgaactggagtcatccatattattatcaagtagcccagaagtacttctaaccagagcgatctaaggatctccgccacagcgccaaagtctctcacatgtcgcgctcaatggacggcgctactgcacctggcgaaacttgtcacaatcatctttttcccgctccaccacataggaggtgttagtttcatcatgattggagaacccacccctcctagtttcactagtctcaaggggtatcctgttaattgggtctgaactctcaagagtcataccgggcctatatataccgggtctatatatggatgggattttgggggccgtgcaatgttcccagggccgctttctcacgggttaatgactcgtcgtttcagggcttacgcttaaattataatggaaaagcgttaaaacatccaaaatagaactatgcggactcttctaatgctaagaagtactagaatgcttgtcttgaccgagcactgtctttcaaaaattagatcatttggtttggttgacaccgacttcctactgctaaaatcattttagcccttgccatttcccatgtcccatgggaatcttcatgggacgatacaataagagtgggaaaaatgatacctttaattcttcatagatgcaaccagcgtctatcgcctgtcaactataacccagcgatctactagtactagataatccaaacatgcccgccgtgattgaaagccaaacgcaatcttccccaacgtaatggtacaggcgggaggactcgcgaaaacacgaatttcatggtccacggagaccaaccgggcagcttctcattactgcacgacctgagagcaaatcgtcagtgctgaccgatatgatggccagagcagagggctcaaaccttttcctgcaaggaacccatccactgatccaagctgacgctttggtccgcacggtcctcaaccagcatagtctgagcccagagacgcagaccgggctcaccatcttcgcgaacaacgtacaggtgaggcacaatcatgctacccacacccttggctcggtggtcccgactcttctcaagcacggcccgcacacgctggttgaactcgttctcgacgtcggggagggtttgcttgcccacccgtaactgcgacttgtcagggacgccaaagacatcctcgataagctgtggaacagcatcacggccaacccagaggaactgggtctggccatcgtcaatgaggtacagaccgtagggcacgaggcggcccgaagacaagttgacagaagggggcaggacgatttcgccggtctgtggatcaggcaaacccgcattgtcgggcatgtcgtggagtgagtacattctcggatagatatattggatgagaagcggcaggggcagagtcgacagaaggcagagagctgcggaccgcatgtccgtggggatctgggcagatttgcgaagaccaagctagagagagaaaaaaaatcgattagtatagaacagcttatcacaggggaaatagagaaaactcacgttcttgatcattgcaaggaacaggacaggcagggctctcaaattggcggggaactggagaccaccaccgctaacactaccacctgcaagctccttgcggtatgtctgcagaagctcgacgatcttggcctgaagagcctcgcgagcgggttcgaggccgctgctcaatgtgcgctcgacagccttgtgactgaagaatgtggcaatggcctgctggtcagccgaggcgtagatgtctgccagattctgggtcgttggaagtgccagggtcaatacacgaatacgacgttcaccgttacaggtagtgtgaaggacagccgcctgcatgcagacgaccggctttgtaacggtctcatcaatggccacctcgaccacataggcctggtcacgagggaaggccgggaaagcacacagatcggaactgcggttaaagaagtttccatagaaggtgttcatacgcagaccggtggttgcgcgcacgcggagaacggcctccagaccaatctccgaagagagatagtctgagaactcacgggcgaacttcatggcatcctcagtccgtgcagcgttccacccagggtaaaagtaggtttgaccaccagtgtagcggggcaagcagctcaaagatgccacatcttggtattgcgacgagaataggaacatatccacggagacttgagattttgaacattcgactgcaaagctcttgtagaaggagtttgcggtctgaagcagactcgattccttgctggttcccagcaccttcttgtcttctctcatagtgagagctccgtgaccagcgttgggcaaagatgagctcagaacggtcatctttccaccgacgggggagatcaacttgtaaccagctcgcaatgccgcacccatggcgcagctgttgttttgggtgttctggaacatttcctgcagcttgcgaaggaagatctcgatgttctcccggcattcgctcagcgtcaccaggagatcaccagggatggggaggaaaggctcgtccagatcgctgacaaccaacatctggggctccgaggatcctgactcgtcgcggggaatgctgaagtagtgcaagcttgagtccactgcaataaagccgaggcgagtacgtcggtctgcgttcgggatgcgatcaaggctctcctggatggtgcgagcggtggtggccaaaagaccgttggtcaccgaggcatagctcacatcgatcaagaagaggtataccagaggttgaggtggtcggaccatgtattcctgcggcgcaacgaattcgaccatgctgtggttcagatcggcacgtagcgcacgatcggcgggcttttgcagtgtagagtcccaatcgaaggcttgtggcacatcgttcgtcaggttgcacatattacagcgccagcggtggccatggtcgaggaaggtgacaaaggggttgatataggagcggcaacgtcggcatcgtgagatgacttggtctggaatcacaggaatagggtcctcggcgtcgtgaagggaagcatatggttggatgacaagggcgaagggcaactttgatttcttcagaagggagttagttgtggggacagcgttgagcgtagaccgcatatatttcgtagggcaattggcctcgggcgatgggtaaacactggtctgtcaattgttagcatatctaccacattcgcaacgtgacatcttatacatactcccggaggcaagataattggaggagggggatagtccagctcagcgacgttgaaaggttgggatcgaaggtccgtggggtaaagctggttgagctgcacttgaggtcgcataggggcttgggccacaggctgcgggggcggcatgtgatgaggctcgctcattcccattccaccaaattgctgtgtcatctgcgtgacatcggcggcaacaggcgcaccatatgatggcgcgacaggctgcatttggctggggtccgcaccgtagacgggttgttgatatcctgcaacttggggctgctgagggtagggcccgtaagcacccccagctgtgggttgtccaccgagcgcggcattggcgccggagccaaaatcaaatgcctcaccagcgtacgctctcttcttctttccagctgctgcaggtgcaggcgcgccttgcccttggaccggggactgtgtgggttctggggagccgtaggcgggctggccatacccttcctggggagggaatcccccctgtggtgctgccattgagtcgagtaggttgtgtttaatcgtacttgggtgttggaaggaaaagagggttgcgctagtcgcaaagtcggcgggtggaatcgatatgaggaggcgggtggtaacagctcctggaaccccacaatcagtttctcgtcaacggaacagggtgaacctggttgcgtacagggcaagctgtacctttagaaaacccggaagtatcacaaaatgcagtggcgaggcaaaggacagctcaccagaagaaaccaagggagtgtgggagaggcggtgatgatggtctacggtggcctttaggtcgtggtgctccagccaatcagaggccaggggacatgtgacgagaggcgtggtgtttttatatattgtccgacaacatctgatattgagtataagacgggttggatatctatggtgagctttaaatatgcagtgtttgttctcaacaagctgatctgtatatatctatccccaggtatttggactggaaatgaagacttagcctttagtccaagcatggagcacgtctatagattatactgtgctgtggattgtaataatgagatttatgaagttttcaaattgattattctgcttaaattgcatcgagcaattatgtatccccgttgtggtgctcgagtctttggaatgtactgtataaggtacatatgttgtagagcaaagaggcggttgccctgccaacatcaaccacatcggctgctgcacaagagaactcctcccacacgttccacaaccttcagttctgcatacacccagtagttagtttcgtttctttgttttttggggaggattttattgttctcttttttcttcttttttcttttggctttacacttggttctagtcattccttaggtttctttggattggatcacatccctgaccaggactcagaccatcacacgacaattgaatgagcatcccgccaaaatgagtgtccgagttgtcgcgcgtattcgtccccttctcaagtccgaacgggaggtcgacgtgatcgttcgtacaggatcttccgctaccgccgagtccaaatctcgccagtcaataagcaacaggagtgacaagagcgacaagagtgacaagaaattggcggcattgagggacagggacaatgtggtccggattccgaaccccaagaatgagggggaggagtatgctttccagttcaatggcgtatacgacgcggaggtgtcgcagcaggagctgtttgatgctgaaggtgagtggctgttcggagctcaccaggcctgccattggctagcatattgatctgaataacagttgcgccaacaattaagcatcttctcaatggattcgacgtgacccttttcgcatacggtgtcaccggaacaggcaaaacacacacaatgcgtggtgggaaaaccctggcagaccgaggtgtaatcccgcgtctactcagcggcatttacagacgcagtcgcaagattgaaaaagatagcaatggggagacgacagtccaggttgccctcagttattacgaaatctacaacgacaaggtctttgacttgttcgagccacccgagaagcgcacaatgtcaggtcttcctctccgggacaacggcggcaagaccgtggtttgcgggctgagcgagaagccgtgtaccactttgaaggagttcgagcagctttatgaccaggccaacactaaccgatccacctccgcgacaaaggtatgatatcatgccaaaatctggggtgtaaattctcttgctaaacattcaatatagctcaacgcccattcctcccgatctcacgccattctcggtgtgaaggttaccgtcacctctcctgacaaagtccgcgtcagcactgcttccgctattgatctcgcaggatccgaagacaatcgacggacagagaatgataaggagcgcatggtcgagtcggctagcatcaacaagagtcttttcgtcctggcgcagtgcgtcgaggctatcaacaagaagcagcatcgcatcccataccgcgagtccaagatgacaagaattttgtcattgggacagaacaatggcttgacagtgatgattctcaaccttgcgcctgtccggtcttaccaacttgatacaattagctctctgaacgtcgctaatcgcactcggaagatcgaggttcgagaagtagaaaacgatcccatgttcaagggaccgccccggcccttgaaccggccatctatggggacgcggcaacctttgcgcgcactaacagcttccgtgaacgtcaatatgccagcgcccgccccgaaggactccgcggaaaaggaagacggcaaacccgtcaaggcatttagcgtatattcggacaagccgcaaaccaagcttgttagccagcttcggaaaccggaagcaccgaaacgcacttcgatctccaacacaccctccggtcttccgtcattgaagtctgctcgccagcccctgggtgcgcaatccacggcgcgccatgaagacttctcagctgctaggatcgaggagatggttgagaagaaggttgaggagatactagctgtgcgggctgtgagcgaaaaatcgaggcagacgcaagcccatgagcttaacgagcagctgcagaagcgattggaacagttggagcagcggattgatggcacagaagatgtgcgggccgagggtctatcatacctgctgatggctaaacaacatcaggcacgcggtgaagacagctcagccctgaggatgtaccagctggcagctccccatttcccgcacaacgagaagctcgcaggaaagattgctgctctgaaggagcgcgttcacgcaaaagcttgggaagagaaaccccactccccgcccaaggggaggttgggtagcatgctctccctcaagaaggacgtaacacaaaccttaggcaaacgccaagcagaagatgattatatagaccagacttatgcctgcttttcaagcgacgaggatgttcctcgtccaaagcacaagaaacgtgctgcagctaagcttggtcagatcgaggaagcccccgaactccttgatagtgaagacccatccacctctccgcggacgatgcatattctctccatcattaactctcgggatgtgagccaaatcaaactgctcaagggaatgggcgccaagaaggcagaggctcttgttgattgcctctgcgagatggaccaagcaccattggatacaaccgacagtgcaatcatctcagaccaccaatttcaggtcagcagcctggcacaactgagccagctgaaaggtgttggggtcaagacggtcgagaacatgagacaaggagtattggcttaattgctgcatttttgggcggcatataccggagcataatggtttttttcttcttttcttttcatgcatcatccttcagcgacggtgccacggcgtctttgtgtctatactttgctaggtattctggacttcttttttttgaatccatccggggcaatttgggaacatcctcattgcacccttttggtgtcatacccctttcatcataaccctcgatccaagatcctttcacgttcgtcccttccttacagttcgccattagaaggtatggcttaggagacccttttccaggtagtattttctccaagtccagtcccttcataatattcttcttttttcagtaccacttcaggcagcttgctgacactgagttggtgtatcaaagacccaaaaccgtcagaagtcccttttcttgtaaaccaagctcctcatccagtttggtccacaatctcgacctagcctctggatcattacaataagatttcgcaggcgcttcccatatccgattgatatatttccctccatcatgcccattttccgcaccaacaccctgcgtcttaggatctggcccaaactccaaacccgtagctgcgtgggcaatagccaacccaccctgctgcgacgtaatagcaacatatcgcaaaagcaagcctagtccgcccggggccttacccgcatcctcaagaccctcccatatacccgaagccacaaagccgggatggacgccgttgattgtgatgtggatgtactcggggtgtttgaggagtcttgactgcatctctgcaacccacatttgaaagtagagcttattattctgataatcgttgcccttccagctttgtttaccattaacacgatccagatcaaagactcctagatggtggtagcacgaggtcgtgcagataattcttggctcggcgctgcgagcgagagacggtaggagtcgaagggtcagcaatacatgggataagaagttgacctgggtgattctcattagtatctgctcgtatgcaccaggagggttaatagaaacaagagaatagggaaacagacctgatgaaccagctggaatccatctttcgttatacgggtttgcacggtcgactccgcaatgccggcgttattgcataggatatgcaaagcgcggtcgcattgcagccatctttgacagaaagcgtcgacgctgccgagatctgccatgtcgatcggccaccattcgatggtagatgaatggccgtgcgctgctgcgaggtctttgcattcgttcacggcggctgttggatgctgttcccatgcgggaggctcgcggcaggcgaggattaggtttgcgccccatgatgcgaaggattttgctgcctcgaagccgacgccgttgttagatccggatataataatccatttgtctgtcagattggtgccggggacgtgttggtctgtgaggggggtgctgtttacccctctcacggcttgcagtagatcgtataatcctgagaacattgaagtcatgttaggatagggcttgctttgacatgaagactaaggatgatatgtaggctcctgagagaaggaaagaaggatcgacctgtaaagcagcggtatgtcttgcctagccgtatctgattgggatccttgcaagtaccagccgtagacattctgttgccttcgaatagagatatccggggtttactcattttcatcgttgtagagacattttaaattttgatcataaaagctgtgtaggaggacgctacctaggtagctctacgcacaacatagtgtttttcctctgccaggtgggctttcctatcttggccgtcgccgcttttatgaggcgagtgaatctcagtccgggctcaagctcagtgagtctggtcccgaagggatgttagggcctagtatatacctaggtatatcgctgcagtgacaatcggatgttccgattgtccctataatcttccttggccgagtgcccaggtgcaggtggctaaatgctcttatgtaatcacttaggtgcccaggtgcagcggtctgtttccctctggattataggtagccctggaggtatttgagacttcctcttccagcccgttggccagctcagttcaccatgggtatgtggagctgtgatatcgaggattgcgacaagtcctctgttcgcacagatggagaatgcatactttgctgtcgtcatctttgcgccgaacatttgaagcctgagtatcacacatgtccactatgggaggtgagtaaagaaaatcatatattatacggaccataataatcttttgttttactattaccaggatgaaaaaagctatgatcctgcggctaaccgagcggaacaagaagaaataaacaaactccttgctaaaatcaatatcacggcgctcacagatcgagccagctatttacgcaagggcgttagctgttctatatcgcagaatcttcaatatgacctgtcgacacggaactcagtcatgggcggtatgaattatcatattgagatttcatttgatgatggggtttgctggttggcgcgcgttcggagattcaatgttacttcaccccccctggaactgcaaaactacatcatgcgcagtgaggttgccacactcgagtttttgggagaaacaaagattcctgccccaaaggtctttgatttcagcttggatgaggcgaaccctgttggtgttcggtacatccttatggaaaaattgcctgggagatctctgtcctggtctgatgctacccgagagcaacgcttgaaggtgattgatcagcttgctgatatctatatcgaactgcatgcacatccttttcccatgatgggctctttggacaaaattgattctaaactttttattggaccgtttgcaagagagaccctggccgactttggagaatctggcttaaaaatgcttggaccattttcgtcttcagaacagtattacaatgcacacctcgatttgattctggacttgattatgcggcaagaagcttatgcaaatcgtccaatagatgcctttttgatacaccgttatctacaggaaaacattccgataatcctcccacatgcgagcctggatgacgcatcgttctatttgaagcatgcagatgagaaaggggaccaaattttagtggacgaccagtttcgaattacgggtatcattgactgggagtgggcgcacacgggtcccaagttttcagttttcaattctcccatcgttctccttccacttgctgagttctacagtgggaataattgcctaggtgatgaagaaatgactttttctcacttgctggaagaaaaagggcatcccgatcttggagacatagtcagaaaggggcggcttcttcatcgcctgcaattttgctgcggttatgaccttcctgactgggatggatacaaggacatctttatgggccttgtcagggccttacacaaggatggaaactcgaacaacctggattatgaaacttggaaggcagatgccatccagcggtacagtgctgatcctcggctcgaaaagcttgccattttgtatgggtaatcatctattgggccatagtcacatccgacttcatcgatctacaacagtaagaagagcgtagagatatcgtacgggaaaccgatagagcgaggagaacgcttgatcacgtactgtcgtatagaagaggccatccgtacctcgaatgtcaaaaaagccctaagtgactactggttcaatagcagtgtagaatacgagactcggcgagttgaatagtagtatagccgtagaatagtaaaaccaatagacgtagccccactatcaatttgcctcttagccagaggcgaaataactaggatcgaccgccaaattgatgacgccagtctttcgttgaggggacaatggtcaagagactagtgaacagctgcatttggatagggctagcgtggtgcattttattgaggtgagctgctgacttagctgctccccgcgctttatcattgggccagaagagaatcagaagtccccctagcattctgcgcacgacccatttccgcgggtatcctccacaacctcaagaagatacaggaataaaagcggactgcaaagcgaactgccataactaagccaagagaaaaaaacgagttggtgccagtttgtcaagaaaaccacgtgattagcaactaacttatacatatagcccctagcctcgattttcttgtcaatgcgtctcaaaatcctcagtttataaagtgaggagacttttttgccttcaattgaacgaaatgtccgaagttacccacccctctttttgcagagttgagttcaaactattctacgactggaacggcgaccggccaacgcagattctgatatttcgccaaaatgagttttcgtggtggatcaaagtcgtcgtggactggtctctgcccgaacttataacagagcttggctattttcagcgccgatctctgttccaaatgtttcttcaagcaattgatttcggtcaaatgcaactgttgcagaatactgtgacaaaaatcactttgagcttgactgaccaaaaccaaaacttgatcacgatccgggatggatttcaggccacgacaaattatttcattgtagttgctcatcgattgcgctacgagatcgcggaagatccaacgagagttatctacccgaatctggaccgagacctaaacatcccgacgttcgaggctagctgtctacaaaatgccgagttccttgcccccacagtcttcacggtcctattcaagcaacataaatttgcttacaaaactatcgaccgccctatttacgagcctggagacacggaacacatcatgaatgagattgatgccctcgcacaattccgcggacagccgaatattgcgcagctagtcggtctggttgcctcagaaaacccttacaagacctgctcgtcgaccaagttgccagcagtagtcacaggtttccttcttgaatattatactggagggtcgcttgagcgaagtatcaacgaggatgaaatgcggaacgattctttgccaattcgatgggctatccaaattgggacagcattagaatcattgcacacgagcgggcgcactcatcttgacatcaaaccatcgaatatagttttagatgccaataaaaatgccatcctcatcgatattagtgggaccggtggttacctgtgggaatggctttcgccagagatgcagattctcattcaacagaacattgacataactcctgcaaacatgccatttggggtgcgggttgctacagattgttgggcttatggaagattgctctcgactatcgccgagaagtgtccccctggtggtactggtgaaaaattgcgatttatcggtgaggctctgaacaaggcggcgcctgaatctcgtatctcgctatgcgatgctctcgcgcaattggaagataatagacgtttaaggattggtgtaagtgatatctactctcttagtatatagctaagtcgactaaatattatataacgatcgaaccataattcttaaaaattaggtataggagttggaacaaaataagagtcctttaggatcctggtccctgatttgtttaaagaaaaataagagaatatttgagtacgataggacgttagtgtggatttgttactatttaatagttatcttagggaagacaaaacgccaattgtagtatctcccgtctttcctgtccttccatcaggctgctcagtgagcaaaaagcggcaaggactgagcactaagatgcaaatggaaggccaagaagtggcagaggaaatcaactacataggtatgtactccgtacttataggtagagtcggacttaaaacttcgtcagttcaaaacaagagctggacccgtataatcaaagctgttccaccagctcagatgcgttgattacctatatctagcgagaaaggttgatcttagctagcagagggtacttaatgattgaggcacagctattgcattcaattgccgaacgatcagccaataatcacctgggcagtaaatacgatggatcattcccccgcgccggagaatttctgcggagtctggggttgaatttcccgccagtcaccgaagtaaaggaatacttgcctcattgagccaagatgtctcctgcatatcatgaatatttcgttccattctattcgtgtgaatgagcacagccattttgtcggtccgtcttgtccgtcttgtccgtcttgtccggataatttgacgaggcctacactcgtattcattaattgagatttaattccggagtttctacgtatccatatataatatgatggtctccgatgcctttgacattcccacaccagcatcatccactgcaagtaccccccgatgaagctcctcactctttccctcctggccgcctccccggcggcagcgcggtcctacctctcctggatggccgattcctggatcctcaacaaccaggaacatgaaggtccatactggtacgggcgcgcaaccatctacgaaggctacgaggcagcctactcactgtacggcaacgagaccctgctgaactggtaccagtcgcaaatcgacgacttggtcgctcctgacggctcaatcgccgacttcaacgagacgtactactcgctcgacgactaccggatcggcaacaatttcttatactggtacgagcgcctaggggaggagaagtaccggcttgcagcggatcgcatcagggcgatgctggaccgacacccgcgcacgccgacaggcgggttctggcaccgggacccgacgtatgagaatcagatgtggctggatgggattttcatggcggacgtattttacgcgaaatggacggcgctgttcgatgcgcagaatgtcactgcctgggaggatattgtgctgcagtgggataagatcgaggctgctacgagagatgagccgaccggtctgcttgtgcatggcttcgacgaaagcaagacggctgtatgggctgacccggtggacggtgcgtcgccgctcgtctggaaccgggctgtcgggtggtatttcgtctccctgattgaggtccttgatgtctatcccaaacatctggatggataccagcgcctgttgggttactataagagactcgcacgaggtcttctccgtacgcaggacccagaggtccatggctggaagctaatcctgagcaaggggtatgttaacaggaagggtaactactttgagagctccgcggcagcaatgttcgcctacggttggcttgccggtctgcgacgaggctatattgacgaacggacctatggacggcccgcagcgagagcgtataaccacctgattgatgacttcgtgacgaagcatcagaatggaacgttgacctgggagggaacggtacaggttggctcgctgaacagcgatgccagttttgaggtaaggctttggcaaataggtatgtgaatgtgctagatctgaccgtcatgcagtactacaccgccattccggttgtcccgaatgatacgagaggcgtcggtcctttcttgcttgctgcttatgagtgggagcttcgacagaagcggtcgtgaagtgaactatactgcactagtatactgcactagggatattcaggacaagatagtgcaagcagtcggccactctgtgatgtgtatattttgtgacacggcagaatgtataatggtctatgttatggtatttagtcatatggtcactgtacactggaaatatccttaatagattatttctgtatgtctgcgggatggttccggatatacaagactatcagtctgtgctgacggattccgccatcttcaactgtgtcttcggtacaatatagtggtcaaatgtcttccgagcctgggttctctgctcaaacgcataggccatctcaatgagagccggctcactccatttcaaccccatgaatccaagacccatagggacgccaggtgccaccgaggtaagattccacggcggactcaactccacaggagttcccacggggtacgcacccatcggcacagtgatgacgggtccaccgacgactgccgaaactggatatcccaggtcggtcggcagcacaaccgcgtcgaggtggttcctattgatcactccgaacacgcctccttcgcccccgtagtagaggtttttcaggtaccgaggccagaactcaggcgaggtgttgtttatcccggcttggagggcttcatcccatatcgcggtgttccgagttggccactcctcgagggcatacctgtgcgtgaaggactggacttcttcaagattgtgtacatggtgggggtttgtcttcaggttggagaggtaatcggctagaccgctgataaagtccgcttggaggacggtttcactagggtcctgaatgaattcctcgtacgccgtgtaattcgcgttgtcgacaatggtggcaccggcatctctgaggacattaaccgcggcctcgaatgcagcgtagtagggcgctcttgagctgtcgtaattcaagtcaaggacattccgtggtataccgatccgcttcccctttaagccgttcattttacagtgcttgacgtagtccggggtttggtgcttatacggcgcggcgagagtatagttatcatgaccgtcttggccggcaatagcctggaggaccaaagcggcgtcttccaccgttcgtgtcattggaccgatggtgtcttggtgctcactgatggggatgacgaggtagcgagacgtcagtccgacggtaggcttgatgccgacaagcccgctcttttcaccggggctggtgatactcccggacgtctacttgtcgcattaggcattttcaagatgtggctggagtgaagaaagcatacctcagttcccaagcaagcatacgcaagtccgagatcagctgcaacgccgctcccgctggacgatccgctgggatcctgattcgggacatgggctgcgatgacctgtccaccccaggcgctccatccattagatgagttgccggaacggtaattggcccactgagagagattcgtcttgccgaggatgattgcgccggatttgcgcaacttggccgcaatggcggaatcagaacctggtttcgcatccattaaggcgtatgatccagctgggccgttgttagtaatgtttcacctctcgatgcaaccgcgtcctaccattcgtttgcatcttgtcatcggtagcgatattattcttgatcagaattgggaggccatggagaggtcttgaaggaatcaagtcagtcgcccactcgcgtactcaagaaagacataaggcatattaaagtgtctgtgcgtaccctcttaagattccatttttccgctcgtcgtccaagtcccgggcaattttccacgcatccggattaatttcaacaacggcgcggacggtggaattgacctcttcgttgcgcttgacgtatgcctgggatgtttcagttcctagctctcatactgagtggggagtagtgcctacatcaaccagatccacgcttgtaaagcacccagctaccagtccatcctggagttcagtggcagtggcggttaggaggtccggatagctgcatttggcagctggaacacattagtttaccaatttggatcgttgggagttgtctttaccggtaggagttgtgcaaagcgcaaatatggctagggccacagctttcaatttcaagatcgccatgactagagacgacaccaaagtattttgtctgcgagcactaggtagctaggtgattcaggacaacgtacacccttcttatactcggatccgtcaattcccagctcagtcgagggtgggggctgttgataagagacgtgattattaattcgcttgtagaagatcgtcattaatttggagtagccaaagcagataagaaagcgatcggaattgaagccataccgggcttataactaacagaaatcaagatatggcgagcgtacgggtaagagtcagaattggtttttacataaaaatcctccaaccaaaatcaactctgaatttgagaatctgcccaggtgccccctccagctaaggggattctaactgacctcgggaggatagagacttggcggggaatactcagatccacctgggtagggaggtacctagatcacaatattatacgtctactgtctccaacatactggtattttcgcgaaatgcggttcaatcagtggacgttacatatgtaattaaaatagaaagcatgaatatagaagaggacaataagacatcactggtttaccaatagtaagaagcgttggtcagagaagtcaaggcccgctcacaatccatctctgccaaatatgagcctccaccgagttggatcacaaagctataccaccaaaaatcttcccgagtgaacctcaaagcagtagtgaattcccaatattcagggtaccagcctgccgattcccaatccgaaaacccggtgatcttgcccccttataccagaatgttatagtgctttaaatctccgtgggtaaaaacaacgcgatgaggcaggtttcctatcattttggcgcgattgagtgtatctttgtattccgtgtctgatgagaagccacccgaccaagcaggctgtatgaggaactcgttgaattctgcctctgactcaaagggaccagcacaatgaccgggaagacggacactccttatcgaggtgccttggagagagcaaattctttgcccaccccagggacttgaccaccctcgtatggtttttaggtagcctttaagctcctttaaaattaaattcttatcctccttactgagggattcaaatacttggcctagttcttcaccgggcacgcgagtcataagaatcgaaaccggtgcatggggtgtgtcagtatgctcgctatagcagatcacccttgggactgggagacctgctcttcgtgcaacttgcatagacaacacttcctcgattcgagtaccatcagaccatttcaaaatcaatccaaatggaagctgagcaatctgattatcatagggtattccgacccagtcgcaataagatcgggaaaaacgtctcagatatctgtggaaaaacccccaaaatttacgcagccatgggtgcgtcggccgaggatttgatggtactcgatcgctagagactggccggaggttgtctggccacgtaaaatcaggcatgaaacagcgaggtattaaccaaggtttcattatgggtatagatgagtgcctgaagtagtcaaatcagtccgaatagttaaagggaatcttaaggttgaaaagggaatctgacaacagcgcgtcacagctactctttataatgccggcatgagatatgggcggtgtatcaacatgatctcttcattttaataattcggcgcaccggcttaatagaacacgaaataagcacaactgaatacccatagaggatcgagaactcttccagggcaagactgagcactaatcggaaacggagagccaaccttggaagtggcagaagtatctctctagtcagatattacagtttgctaatccttgttatccttttagatagccacgacatcactaaagtggggattatttattagatctaaagaaaagaaaccgagaagacatctaaaaggccaaaaccgttgacaaggcgcaagcactataccttggtgagtttaaacccaccaacagcccccctggcaaaagcaaacaaagtcgatccaacaatcatgacaacaccgcagaaaatctgcagccgagtataactgccgtggagaacatcgggcaccaaagcaccgccaatgggagtaccagtcaaggccgcaaacgagatgacagcaaagaaagtaccgttacgcacgcccacctggcgaagatcggagatctgcgccacaagagctggtgcaagtgagacaaaagcaccagagccgaatccgtacaaggcgctgaacacgattgccggggcgttaccctttgacggtagccagagggccagaacaaggattgcggagaagaaggttgtaataaccatcatgttatagcggccgaccttgtcagccagataacctggcagcgtgcggccgaagatactattcggattttgttagtccatcaacgtaacttgcatggaatggaaaaggaaaaacttacctagaggcattcaagatcggaatcagatatccggccagattggaagacatgccatatctctcggcctgggtgataacgaaagtgaagggcaagaacatgccccagaagaagcagaaggcagcagcaagcgtaagtgcgaacttgagctcagccaacggcctgaggaaactcaggatatcgaacggctttgggcgatggggtaatcttgacttcagcgtgagattggcaatacccaacatgaataaaatgaggaaggcgcagattctcatcgcccaggggaatccgactttgggaatcagttgggtgaccatgatagggaagatgactccgcccagactggatccagcggctgttacaccgagggcgaatgcacgacgcttagcgaaccaggtgctgacggagttgacggaggcgttgaagatggcgcttgcaccgattgggctgcagattccttgtgcgagaatgaattggtagtactctgttgagagggaagccatcattaggccgaagacgtggaggattgtgccgatgaggaggatccagcgcggaccgtagctgtcgaacatcgttccgaatattgggccctgggagggatgttaggataagtccttgggcaggggaatgatatacgtacgcagaagaacatcatgaaggtctctagcgatgtgatccatgttactgtgctggtggagaactcgctcaattggtgactctggtagtatgcttggaagactccaatgcctggatgatatcaataacttgtaattttcttgtattcagtcagcacacaggacttacaattgatccagccgaagctgacgaatagaccgcagaaagctcctagtacgaccagccatgcttgcgcacctccgtcaggtggtggactgatcaccggtgttgctggtgctgggccggcagcaattgacttctcggtaggtggtggtgcttcgtgtttttccgatggtgcgattcctttctctgggtcattattgccatgcacactcacagcgggagtagtagtggcactgtcgatagagggagtagtctcagtctcattattggccatcttgactatgaaaccttaaaggttcgagtgatagacttggactaattgtaacctgctttgtggtattagatatcttgcattctgaaacatttgaaacaagaccatcaatttatagatcccaaacgaagacgggaagtataaaattaagaaacaagattgtgcatcgaacaagttcaattcaaaacgcacctcaacgtcggcccggccgtttggtcctaaagcttcagggctgctgcagattaaaatagcagacaagttccgttggggttcaaatgtataaagtctacaattatgatatttaaagaaaaaaaaaattctccggagaaagggtacgaacgagttcggtctatcggtccctagcttaagtccgagttgcttaaccattactttcacttggcgattggcgtgactggcccagcgagagcatagtggcttcactgcggttggccaattgctggggattgcccgaactggcgaataatactccgtacttgttaaaggcctatagggggtgcagtgctcggacatatctgcattagtccgaagaccgagggattacccggtatattgctcgtttgggaaaagatgaaacatatcattttggttagatgcagctgaaacttgatctctgatattattccggctatagatcacagtaacactggtggatatcgaggcttctacttagccacttacacgaaagaagcagaatacacttacatagatacatatgtagttctgtcgacctttgaatacatccatatgtaagatatgccgaccgtgacagctaagcactaataaagggaagaatatctatacctatgtaaaaaataatgcatcgaaggaacacaaatggatacgtttagaagaacaccaaaagactacagagctggtagaagcaaagaaaaaagagatttgtcggaccaagataaaagaaatgcccatactgtacaggatgcaacgtgataatcatcccaactggagaccgctctaacccgtacaaaacccaatgcgatgagaactcctccaagtcaacccttttgaagcgagtctgtctatttagtttgagcgagcaacttcctcaatttcgacctttccatctttgcggagcttcgcaacgcttcggctcgttccttgaatttcttgctctagttccgcaacagagcgggttaggccagagatattgctgacggccttttcggcttccgttttctcttcttctggcttatcctctagtgggttcttctctgtcttttcgccttcggtggagcggggagggggcgaggtgaagccactcggaacattggcgatctcattagcttcctgtgccgacaaaacgtcgttgagacggggtccgcgggattgcacaagaatggtcatgggaccgtcaaattgcaggaagagctagaagacattgtcagttggtggacattgaagggcaaaataggattcgtactctatctccccagatggtcattcgagaccaggtacgcagcttgtggaaccactgcatagtggttttgtatgccttggaatctgatacgtcgcgaacaaacttggcattttgtagcagtcttggtagcgtcttcagacccgggacttggaagttgagagtggtggacttgaaacggtaggggcgaggagggttggaagccatggtgtaagcaaccacattgctggcgatcaaatgttagcgacgtcaggcgtgcaatccaggcggaagttcatacctgggatgcgcaatgtactgctcgccatctttcaattccaccgagtacagctgtccgtttccaaccaacgctattaaacctctgccagtcacctcggagctaccccaatgagacaagctctgcgaagattagcttggcgtttccacacgatcacagctcgactcaccaggtttgcgttgatagtgggcttgatgttcagagatcggcccgtccatgcaagcaaagcccgtctttgggcaaccatccaatccacggaaccattgacgtttacaacggcgaaggaggtattgggtgatcgaacggaaacgagagctgtgacaggacttggtgaggagatctagcaagttgtcaatcgctgtccttaaatatgtaggcttcatcgtgcatcttaccttctggtacagaaagggtactccgacgatagccctccggaagggttctagaacgctcaaggtggaaaccacctgcgcagattatgcattagcatgacaattcctccaggacaacattatcatggaatcgcatacattatccgctttgccgctcaatccaaccagcgttcctcgtcgcgtatataggttttgcgaggccgagagtgacaccgaaagaagcgaatatggggcgccgacaacatcgaatcgcgcgtctatgtgcattaattgtcagcgtcacatcaagacaaccccggggacttgcaattacctcgtgattcaacagagctgggcgtgctagcgagtggcagattgtcgccattaactgaaggcactcccgagggagcggcgcgaatctgaatgtaccgcgtttgccggtgggcgcgaggaacaacacgagtccaggacagagtccggacgccttgaagggggcgcatggtgtatgcaaaaaaagagtgaagaccaaacaccgaagggagaatttacgtcagttgtgacgaaagggaaatcgggaaatcgtgggcccgagagcgatgcggcctacaaggtacacaactccccctcagaattgcgacatttggagttttattataagaagttcttggattctttcatacatatttgtgtctatcattcgcttgactatttgcgactaccctgcactttgcattgagagcgacggtttttcctccgaagccggcgatttccccccacgagctatcggagacatagctactgcgcgtcaatctttcctacttgctcccactatgcgcccttgaacccctctcggtgacttgaactactctggtgcttgaagattattataccaagcggccatgctgctcagagccgcacgatcgccgtgttggcgtacagcgcaattcgcccatccgagcttcgccggcaagctacgaagcacacgactcaatggaacacacctgcgcgcgttcacatcaaataacaatccattatggagtcaatctgcagacaataaaggtcgcgctgtcaaagctactccaacctctacccccgcaccatcacaactagcaaatgccaatgtcatccagaagccggaagatagcggcaatgcaaagaccccaccaaagaaggacttgctgagcgagcccatgaccggaaaacaggaacaaaggaaggcagactgggctattatgaaagaaatggccaagtacctctggccaaaggtaattcccaagtgctattggtatagagtaacaggttattgactatagtgggtagaacgattggggcacgaagctccgtgtcagcacagcactgtcacttcttattggggcaaaggcaagcttcctttgttatggtgtttctattagactatgctaatatgaacccaatacagatcctcaatgtggagatccccttctactttaagaacattgtcgactccatgaatgtagactttgctgccatcggtggaactgcctacaccgtggctggatcaatgatcattgcttgtgaggatttcagcatatcgaaatgttgacttgtcactgatatgttttagatggcgtgactcgaattggagctacattgtttcaagagctccgcaacgcggtctttgctagtgttgcgcagaaggcaattcggaaagtggcatcaaatgtctttgaacatcttttgcgactggatctcaacttccacctctctcggcagaccggaggtctgacccgcgcaattgaccgcggtactaagggcatcagcttcctcttaacatccatggttttccatgtggtcccgacagcacttgaaatctcgcttgtctgcggtatcctggtacgatccaacaacgaatgacaacgggaatccttgttcctacattactaacgtgttgtagacttatcaatatggcctgcaatttgctgccatcacaacaacaacaatgatcgcttacaccgcgttcaccatcactacaaccgcgtggcgaacaaagttccggagacaggccaatgcagctgataatcgcggagcaactgtggctgtggattcgctcatcaactacgaggccgtcaagtacttcaataacgagaaattcgaagtggcacgatatgacaaagcattgaagaggtatgaagatgcatcaatcaaggtgactacgtctctggcattcctcaactccggtcaaaatatgatattctcctctgcgctggccgcaatgatgtacctggcttgcaatggagtcgcgaacggatctatgagcgtcggtgacctagtcatggtcaaccagctggtcttccaactctcggtccctctcaatttcttgggatctgtctaccgtgagctgcgccaatccctgctggacatggagacgcttttcaacctgcagaaagtgaacgtcaccatccaggaacgacccaacgccaagccgctgcaactgcagggtggccagatccgctttgagaacgtcactttcggctatcacccagaccgaccgattctgaagaacgccaccttcactatccccgcaggacagaagtttgccattgttggccctagcggctgcgggaagtctacaatcttgcgtctgctattccgcttctatgatgtccagtctggccgcattttgattgatggccaggacatccgcgatgtcaccctcgatagcctccgcaagacaattggagtggtaccacaggacacaccgctgttcaacgataccatatcccacaacatccgctatggacggatcgatgcatcggacgaagaagttcgccgagctgcggagcgagcccacatccacgagctcattgagcgtttgcctgatggctaccaaactgcagttggtgagcgtggtatgatgatctccggtggcgagaagcagcgactggcaatttctcggttgatcctgaaggatccacagctattcttcttcgatgaggcagtaagtgttcatttcccgcttcgtccgtcagcggagcggttaattgaggtaactaaccacctgtctctagacatccgccctagacacctacacagagcaagctctcctccagaatatcaacagtatcctcaaagagaagagccgcacaagcgtgtttgtggctcatcgcctacgcacgatttccgacagtgaccagattctggtcttgaaggagggtcatgtggccgagacgggctcgcaccgcgagttactcgagcgtgacggcatttatgcagagctttggaatagtaagttcatttttttcattgctgttggcatgccttgctaactcgattttagcccaggaacagtcgatggaccaggatattgacctggagcaggatcagggtgaagatgttccgcccaaggcgtgagatcgagaatctgtaaagaatcatcccgcatataggtgttagactactttttatgtgtacttaaagcctaccagcacatacctcctggtatcgacaccatcatatctccttgcatgggtcgttgtgctaaataatcaactttgcataaaggataaaccgtgagagatttacatcactatatagatctcatggcttgcaaccccgagggacatactgaacaaggtccagggttaaaaacacgagaaattactatggaagctttggaaactacatttgcacatggattttaccatgatgaccatattgatttccaggtgaaccctcacttgatacagcgtaacccccacgctttccaaggttgtttctcggcccgtacccgaaactacgccaacccatattgggatagcgtgtaaataatcccattcaaatacatatgtaactagatatgtacatatgtacatattccttcatttcataaccgcattatgtataataccgtactttacagggaacttctatacatacagtgacgcagcaaagaatctagcatccctacatacatacggtaggggaggttggccaccaactcaggttagtcatccaacttggccctacgcatcgtgacttttcgaattgcgacgttcgcctctcccccaaacgcctccttgctctcgtccgctttgcgttcaaagatggatctatctctgtactgtcaaagcaaccttctttacacacaggagtcattgtcaaaatatcaacctggaggataccatccagtcaatctcggagatacatttgaaaatgaccgttacaagatacatcacaagttaggatggggtggcttttccacagtatggcttgcgaaagacagagagtccgtttttccaacaccaactttgctcatatttagctaatctcacgccagccgaaatcaatgggtctccttgaaaatcatgaccgcaaattcgtcgatatcgcgagagctggaaaatttgaaatttttagagaggcaatctcgaagagggctttcttcagactatgttgttcagctgcttgatgcattcccacacaaaggtcccaacggggtccaccaatgtctcgtatttgaattacttggtccttcagttgataaggtcctctcagactatcatgagagtcacgacaagctctacccggaaaccgtgctccgagtttctacgcagattttgaaagctgtcaaatttattcacagcgtcggcatgtgccatggaggtgaggttgcttcccccctctgcagttgttttctgtggttagggctattatactcacttcttattagacattagtggtcggaacattgcattcacttgcactcatttgtccaaacaaaccgaggagcagctttttgatgttcttggtttcccggagattgagccgctggaacgaattgatggcactcctctagggaatgaattgccggcccaactgatcaaggcagcagaatggactgagtggatagacgaggacgacgaagatattcggcttcttgatttcggagagagtttctatcaaggccaggagcctcagaagctggcccagccgggttcattaagggtaccagagacgattttcaccgactgctttgattatcgcgtcgacttatggcgcacaggttgcatggtaagtaaacatatcatttctttgaaggaaatatacttacggcgatatgcactgtagatttattccttcttattcacgacctggccattctggtatcttggcgaggacgaagttttaatttttcaaatggttggctttgtggagaggttgccggctgaatgggagcctaagtgggaatcaatgcagatggcgtctagccataatctggagctagaagaaggtaataaaaccgatccaacatacagaattgtggctaattttgctcgaagattatggaatctcgaagcttgaacagaagtttgctggtttggtacccgatccaacactcgaacctctacttcatgtgatccaaggattgatgcgatttttaccgtctagtcgccttaccgcagaaggggcacttgatttgctgggtagtgctcaagattaattgatgaataaacaaaaatgccaatacccaacgccaaaacgtttatctataccattccaataaccgggttgtgagatcctgcataccatagtctatcatctcattactgaaattgttagagccgggggcggagctagattcaagattctgtaatccttcaagaaagaaaagaacgcttctggcgatcgtttgtctgttctataatgacgagggtacgtgtgcaatggcccaagcggtctgggtgatggattcagactctatgtctggttcctgtgaggtttgctcttcagagccctgtacgcatggccccgatattggcgtctaacccttattcgccgcctcatctcactgcttactgcaacatagttacgcttggccttatggcattgagcccgtcctaagtgatctgatcacttgcgcaaaatgtcattatgttaatgtttggcggtcttagaattcatcatcacaaacgtccatgcgccaaatgatactcaagcattatcctaccacttggagcctaaccaacactttgggattgaacatctctccatgaggctgacaagccaactgcataaacttccgaaatgggaaagagacttgtgtgttgtcaaggctgacatacctccagagcctacaggcatctagcagaagcccaatcatgattaaagaatacaacgtcatcaggagttaggcgctgcgcaaatacgtgatcgtccaattggatgctatgcgttgccctgttatcaccctgcttatgcccggtgctgcgcagtgctgcgcccaattgccaaccccgcaccccaaggcatcccaatactcgctttccaaacggggccttctcttttataaataccctcgtaaactcccaggatttttctcatctatatactttgacttcttctctatcagtctcattgtcactcacaaagcttcgttattcaaacatagtgcgctatggtgggacgttatttacttccgctcccttcggacgacgaaatcgaggtcctcgagaagaagatccaatatcgcttcgtcgatcgcgaactactgcgggaagcactccaagcctccaccgatcggaaccaagatgggaataagacccttgcccttttcggcgacttagtcctcgacttggttcttgcgatctctggccgtaaggaaaacaagcctcgaggtaagtgtttggccccagccagtcttatttcataaactgactccggatcccaggcaaaataaaggaaatgtctacgcagaaggctgggaatgtacatctttccaagcagggattcgacctaggaatcgacaagttcattgtcaaaaatccttcccaaactgtcgtcgggatcaacgtcatggccaccacaatggaggcaattgtcggggcagtctatctcgactgcaataaacagattgcaccatgtgccgatgtcatggtcgcgttgggtctttcttggcctgagtgaacaccaatcacctgccacggtgacatacagaaccccccgacgtgggggctgtcggggtcgattacagcccgtggggcttttcattcgacagtgcggtggctttcgtcgacttgcatgccacagcactattaaatgagtatttcccatgtctgtagctgaccctgcttgctcccacgccggggggttctgtacatttccgtggtctagaattggatccttaaggacatagcgagagagatcttccgggagagatcgtgatggagaggatggggattgatatggattttgagaattagggagagaattggaatagctgttgcactgattctgatactatgttcgcctcgtagtgatgtaactcgacgggtaacagcttaatgcccgaaacatgtatgtttcagtcatgaaccatttcccggttaaggaaaatcacaaggtgatgatatacgcacgctccagcccttggctaactgcgctcggtgaattgcgtcgcacattctcaattttatacaagtcccggcatcctcaaacgcctcggatcttatcccagacatcttcaaaaccctcaaagctcggaatgtgatgcacctgcaattgatccaagacaccttcgacagaagctcctttttcaaccagaatcctagcaatcttcaaatagtcttcatgatcgtctgtgaggtgttcatcatctttatcctccctgtcgcgaggataccatgcccgtggatctaacgccatgtgaagagcggtcggtccacgagttcttccatcggatcctttgaagcatcccgcgtttgcattgacatccgcaccatgcttcaaaagaagcccaaccatctcaacgttaccccccatgacggccaaatgcagaggatgaccgttccattcctccccctcaagattagaacccgtataggattcatcgtgatactgtgctgtagaagcacagacgttagctcctgcagcaattagcctctcagctactgcgacatgaccccattccgatgcaacatgcagtggacgccatccgcagctgtcggtcttttcaatgtcaacgttgcattccagcaaaaatgacactgcctctgtcatcccgcgagcagatgcgtgatacagaagtgacgggtgatatcccaaaaatgtgacacatgagttgagatcctcctcgagtttgagaagatgcacaaacatggtgtcgttacaatactccaaagcgccccaaagcatcgtgcttccgttctcattccttatgtttgatatctcctgacaaatttctgcgtcttggaggaaggctctagcctcgacagagcgatagggatggtgatcagaagtatgttgcactatattcatcggcagaaggtgctttactgtatcatgataacgtggccagtgcagcctctcaccatgacccgagccatatagtgaaaatgccgcacaatggatgggaaagaagccatcttcatctggtgtatctgcatgagcaccatgggagatcaaactggtgaccaaatcgacgttccctctgtctgcggcgatgtgcaacaatgtctggtcatttgcgtacttgtagtttagcttctcggcgcgtttcaatgccaggcatacgcagtcgaaaacctctttggtgctcagctgaccccgatactccaaatgctgggtccaatgccccgcttttggcgaggttgaggcatgcgctattaggcaacgcagtgagtctgtattgttggctgccgcagccgtcaaaattggatcaagtctactcccaaaagaatagaagcaatcagcaccaacttccaatagagtggccgtaacgggagcaatcggaatcttctccgctgcaagaagaagcggagttgcatttgcttccgagtcataaaagttcacgtctgcccccgccgacaccaaactagtcaaaatctgctgggaggcctgcgcaatctcttcgtgcggaatatttctgttttgaagtcttgcctttgctctcgcttgttcaaagtagtacttaattttagaaagtgtgattttctttctaggcgaagaaagcaaggaagaaggttcggcgaaaagtcggtcgtcaatgctgttcaccaattccaaaacagaatcgccacctggtgacactccactcccaataagggtctccacgatctggcattcaaggtcccggaccgcatccatcacagtaggtcgaaaactgagactagtagggggctgcgcgcccaaggccatcaagagacgagctatactccaagctttccgcctcaaggcactagccaatggagtaaataattgactttcatcttcgtcttcttcgcataaagacccccgagaagtaagttggcacgtttgctgggacagtaataagacgacggcctcttctgatagccctcggagcagtagacgaagagcttcttccacctcttccacatcccagctcgggagcacggattccatcatggtatgaattggagtccgtccgagcctgtcgacagtatggatcttagacccagctgccatcagcagttcgatgcatcccacactacgacacattgctgccacgtgcaatgcagtctttccttcttcatcttggaacccgaggtcggccccctttgaaagcagcatgcgagccatttcagttgccgagttcctattttccggctcctcggtgtcaccaccagcaaggaaaacggctaaattcaggcaattctgccatccactttcgttgtgaatccacatccacgacaactggttgacatctgcaccaccttcgatcacagcctgtgctgtctcgaccaatccgttgtccacagcgatgaccagagctggccgttgatacgcatctaggagatcaggttgtgcccctttggataacaaaagcgatgcgaatcgtggatcttgttgaccagcagctgcatgcaaaggtgttttgccataataccaactatccacctgagcatgttcactgtccaggattactttggcggttgccaagttcccgaggtcgatagcagtgtgtaatgctgactcgtccgattcggtcggtagtccttcggcacccttttccagcagaacttgtacaaaacgcgggtctctctggtgcgcggcaacgttcaacagcgatcccttttcggaaacgtaatttacatctgcaccaagttggatgaacagtttagccgcctgaaaatccgcatcctggatggcggaggccagtagaattgacttccacgttgatggatcttcctttatcaattcatccttgaagtaactgctcgggtcctcctggatgtatctctctccggcaatcaactgcgtcgcgcggccttgatattcgtatttatgtgacttcatcgtgtttcgccacgtggactgagcaacaggaactttgaagctctccctggaccagaacctccggaaatccttctcttcggtagaacccgtttcttcgaagtgagccaccagcaagtcgaatatcaaagcattcttactctctgctgctatttgcatcggggatatgttctctggtgtattcaattgtctcacgtcatcgacactgagggtccgaatatcagcctcggtaacgcgcgacaactgcgtttgatgatgctgcacaagttccaaaactacctcggtttgaccgcgagatatagcccagtgtaatgctgtccaaccatacttgctacgcttcgtgtattttgcgtgcgcagatagtagaagacgaacaatatctaagcttccagtgaatgatgcccagaaaagaggggtccaatcttgatcatccgtagcatcgacatccgctccatttcgcacgaggatttcggacgaggaaaaatgactgtttgcgcaagagtagtggaggggtgtccagccatgagtatctgctagagatgtactgagtcctgattcgaccagagacccgatggttcccgtaagattccaataagctgcaacatgcaaagcggtctgattttgagggattgaatcgaaaagagagtctaggagatcgggttcgagctcattgcggaagtgtaatgcttgaacggctgcattcagcagtctctcgttggaaatgaaaaactggaccagtgagcttagatcttcttccaccttttctatttcattgagatgcctagcccaatgccgtgaggcataatccagaaacagcatttcatggaagcggcgagacatctgcacacgacttgtgcatggcccttccctgaacggactgagacacatatagcgcaaacatgtctctgcgatgtcggtctcaatgtcatgcggtaatagcacggtggattcgaaaaagtcgtaagcagtcgcatggaccatcgcaacagtattgtcatcatgtaacaccactagaccaacacaagatcgaaggagaagatcagggctgacgaaattatcttcttcaatataatcctcgtcactttcgacagcaaatgcatgaattacttcatcaattttcagacgtctcttcgcaaagacaacccatccgataagtcgccgagcaagttccctccttgccactggttgcatatcgatccgctgtagtgttgattgatacacttggtccaaccccgtcgactgtttttcgagggctttttgcatatggcgaacagtggtgagatccaagatctcatccagaataagcttagtatgtaaaaacctggtgtctggtcagtgctgtaccaatgtaccagtgatggttcgtacatattccccgatttttctgtgattttcccaatcagcttttgtgccccccgaggcagctcgttctctttaaagcgggagtcgatgtagatctctaaatcttcaaattgcgaacatatctccatcttggttgcagaatccatagccttcctgatatggccaaggtctcggctcgttaccattactctgcatccattttcgacaaaggaagacaggtaagggagcaaaccatctgctccaggtacctcatctagcccgtcaactagaagataggtcgacttcaggtcacaggccgttgcaaatgattcagcgagccctgcaggttcacgctgcttcattgggtccatgaagagatgtttcattgcgaggagcactctttgatctccttgctcaattacttgttggatcatgcattgcaagattgctgtgagactttgttgttctcgggatgaaaactgacaaaatacgtataccacggagcttgtggtctctgatctcttatccgataggtgaccaatcgtcatggaactagttgcctgcgttagacattgcaaagccatgcgtgggaggtttcgagcagtacgtacgaaagtagcgatttgccgacgccagctattatcggttagtaaatccctgaagttacaagtagtccttggaaagaattgtttcatacgggctccgtagcaccagagcagtgatggggctccggtacgccagttctccacgttttgggaactcaaaaaccatttcccagtcccaggacaggcacttggtctggagcgtaaaaggttatctgatgccggaaaaagcgagtgaagatgctgcctaatttgctctaaagtttgagttagagctattttgagatctcatggcacttgaaagactaccttggtcgatcgctgcaaccttcttgaacgtagcactggcaacggacctgctgcaggttagttctgcttttcaagtggttgcagatatgagatgggtcttcgaacatgatacttgttgaaagaaaatcggcaaagatagatcggtaccgatgcaagagatcaatatattttttgacatctttttcctgaaacggccatccgagacggcgtagtcgtttgtcgagatcgaggtgaaggaccgataagtggcggcggcattcttgaagaatatcttcattgagcgaggatggacacaagggcagttctaaacctgtagactctgcttcttgtatggccttttccacccgaaagagcacatctgtgagggctgagacctcctggagatatagcttttgcgttttgggggcggatttgatgtctgacacgtagctgtagctgagcttggtaatttgtcctgcaatctggacaaggccggcaatactggcgactagccccactacctctgccatagtctcctttcgtctttagatggaattggaaaggccgtgaagagatggtgaagagtgcgatgtttgcgatgtttcgcatgcggggcgtctcgaccagaatggggcgaagcgacccaatcaagcatacctaggtagtgcggggcatgacactcatgaggggcacacctgaggttttctctcaacgtcttgcccctttccgtttccttatatagctatggaggtctctaaggtaccgtctccacggattgttcaagggccccaaagtcggggcttggctaatgagactgatattcaggaacgaatatcaagaagcttggaaatggctgtcacattgatttgcccggtcttttttatctgatacgtaggtataagtacatatcatatgacttaaaatcttgcaagtatcgaaggccccgaggatgcatgcaattggcttagaatttgtcacagtaggcaaagatctccatgtattaaccttaatctagctaaatataaatatagctggctcctatatcgcaatctattgggcttcggggtttggatggcgcagcacagcagagtaagccaactaagcatcttcttactattagtacaagaatccgaagaccgagccgctccggaccttcacccatttaaaggtgttgaaggctacgatactgaatcaggtacaccagcagacactagcatcagggaaaatcaggaagaagaaactggtaatgaatcaaaaagcaggcggtatataaagcctacatgagcaaagagaatggcaaactaaggaaaaagcctcagtctgcatatagagacatcctatatatgttttgggttgccagttgatggctactgataagtgcaaaggggcgtaattatgccccttcgcagataaggcttttttaacaatatatatcagtttcaactggaatatcgtggtatcgaaaattgagttgctataagaaagaaatatatatgtcttagggtaagcttaatggagagcttaggattataagacaattagcaagacaatcatctcgatcaaaccttcgtcctgctcgggagtaaagccttattgattggtttactccagtccagtggggcagccatttccccacatatactaatgatgtcatccacgtcatagtataggatcgaagtatatatagccaagatatttctgggcactgaactacacagattcattctacaaacccaatcacaatgtctttctcccataaagaacccgaagttctcccctcaggaaacaccgcgccacaagtacctcagcaagaccgcacgtcccagagtctttcgcagcgtgtgtcccagcctgagaactccgagagtaaggactatgcaatgaattcagggagtgtcgagaacaaagagaatgccgagaagaccatggaccaaggccgtcgcggcactgctgcgatcatggaggaccaccacgtcagcagagaagcactgaagggtcctcaaggtcaaccgccgcgcacggcagaagaattcaaaaaagaaggggagactagcagagccgccgatgaatcgcactctggtatgctttcactaagaggatttgctcgctttggacaacgctaataagactataggtgattcgactgaagctaagggcagcaggggcaagcaaggtaccatggagaaggtaaaggagaggcttgcgcacccgttacatggcaagtaatctgagtagatttggttcacattgtatgggatcatcgggttaggaaagggaggagtggtgattcctgaagatgttgaaactcgtaccagtatctcgagtcatagtcacctcaatgacgtttgtggtggaaatatagtagtgcattataccaaataaactttctaaatacctggttgtctccactatattgacgttatggtccactgaaagcaccaagtgctacaagttgtcacgtttatccactagtgaaaaccagtctcatcacacagtaaatatccaattctgggcttgagaatcgagatgaacgattcaataactaccagatattggatagtcctggctgtccaagataactttaagaaatagtcgccatggctagccgaaaccccgtaaggattgccatcggtgttgatcagatatacaaactcctctgaaatgatggatgcaatagttgaagcaatatacatagagaaggtactcgtctgcaatgaaaataaggtcagagtggctttcccgtatagtagcaaggcctttgactgactgcaaggcttaaaaattccaccaatgacggcggcaagtcaggattgctggcaagagcgtgcttcggagccgcgtgtagatgccagcccaaatttccacgccggaatgaggttatccagtaacgactagatagccccgaggcacctattgcaataacgtagaaagttgatagtagtcggcttgttcgagctaatgcggctaaccgacttatggtgtattcgaccaatagaaccccttgcgtatttgccaaaaccgaggtctggagggaatggactgggactcggagaaaagtacagtcggtgatgttgttcttggtccctcgacagatggacatgacgtggatagaaaggtgctggggcatattgccaccagttggatcagggagatgtatctggtagcatattcagcagctatcgtcccggcaaataagagtcaacttacatactttcacgatatctgccgtagcaaaaaagtatcggtggcttccagcgaaagcacataaaagaataagaatcaaagccactagagagaagaaagctctgaagaccccggcaaaagccataattcaataagccaagctgtagataggtcccggcgctttttaatgaagacagggatccaaaaaaaaaaattgccaggggcaggcttaaacgctatttgggtggcttccaaaccacctcttggtaaagcgggtgttcagtggacaccttttcgtgaatgacaaaatgatatggagggtcgtgggggaagtatggggttattaccagggctgatcagttttgtatcacacgaaggacacaaggccaggtggctatccattcttgatgactggataatttatcaagggagactttaccaactgtcattttcgcccccttgcgcttgtgggcgtgttttgcgaggttgtatgacgcctcccaccgctgggactccgaagggaatataatataatatccgtgcatgctcatgattattttgcgaattaattaatgcagcagtaatcaaaaagtaggaacacagatgtaacaaggaaaatgaatgatcgttacgagtccaacatatttagttggtggacggtcaaattccagccaacgggaccgcgctcaacccaacgaacagtaaagcgaggctgggatggccatgtccatgattcctagtgatgtgttgtagttaaagatcagtcattatgctgtgataattgtacttcccctttcaccacggccacccaggcttacagggacagttagtggctgaccaaatttgcttaagtctgcagagtttatagagctagagaacaaagggcataagggacgtaaaatacaataggtatttgatagctggtcatacttttgcggtttttggcgcggtctactttttgaggaatgccactcatccatgactctacacatacatacatatatgtcattcgactggtagaatcacaaaagcccatcacctgagacaccgacacggattggactcctcactatagtatatgtcggctctcggtttcccggccagattcgagtaaccgagctcggataaagggataatttgaaatcctgtattgctgacttgtcattctcgggaggttatcggaaaagtattgaaatcgtacgatctacaacttcaagcacttggataggctgccatcggattgaccggtgatttatcggattagccttactcggttcgggacctggcaacgccgatcgatgtcgatcacgatcaatataaactcaatgtaactctacatccacctcgacacctttccaatgaacatcattatccgaagttttacatgagagatcaatgtgaaactcaatttccgacgtgcctgactgcttgatgacctaattatccgaacagtgttggctgtcgaacatataaagagactaggattcccagaagatcccgaagaacagtcacacaattacaatattacaaaatcatcaaatcatacattatgttgacattgaatgttttgacggcactgttggcacctggtgtgttatcatctgccttgcctgctcgcgatctcaatgcgcgtgccgattcgaagcctgctgctcttcaagccatcctgaacaacattggcgccgatggatctgctgtttcgggagcatctgcaggcgttgtggtagcatccccatccaaatcggatcccgattgtgagcccccttccttcctcacttaaatgatagaaactaacagcagctagacttttacacctggactcgtgatgcagccttgacatacaaggtcttgattgatgagctcattgccggagacacctcgctggaacctaccatccaggactacgtctctgctcaagcaaagctgcaggccgtgtctaacccgtctggtgacttgtccgatggatcaggacttgcagagcccaagtaccacgtggacttgactgccttcacggaggcctggggtcgtcctcagcgcgacggacccgctcttcgagccacagcactgattacctatggtaactatttgatttcgaaggagagaacatccgtcgtcaagtcgaacatctggcccattgtgcaaaatgatctcaactatgttgcgcaatactggaaccaaaccggattcgatctgtgggaggaggtcgagggctcctcgttctttaccattgctgcacaacaccgcgcattggtggagggcagcgcatttgccaaggcgctgggagagtcctgcgagggatgcgattcccaggcacctcaggtcctatgcttccagcagtccttctgggatggcaaggctattgtttctaacttcgccaacaatggtcgaaccggtctcgatgccaattcggtgcttacctcgatcggaaacttcgaccccaaggctccctgcgatgacgtgaccttccagccttgctctgctcgtgccctgtcgaaccacaagctatacgttgactcattccgtaagatctatcctgtgaacagtggtaaggaagctggaactgccgttgctgttggacgttattccgaagacacttacatgggcggcaacccatggtatgcaaatcttccggtttcatttatgtagctttggactttgctaatatttctaggtatttgaccaccctggccgcggccgagcagctgtacgatgctctttaccagtggaagcaactgggatcgctagaaatcaccgagatcagtcttcctttcttcaaggaccttgtttcgtctgccgccgccggaaagtatcccagctcctcggaaacttacacgtccatcactgccgcagtcaaaaagtatgccgatggatttgtggctgttgttaaggagcacacgcccagcgatgggtctctcgctgaacaatacactcgggacaacggcagcccggcctctgctaaggacttgacctggtcctacgcggcgctcctgtctgctgcccgccgtgaggctggaacagtgccccctacctggggtgcgtcgactgccaataaggtaccctcaaagtgtgagggtagctcggccaaggggagctacacgacaccatcagtcggcaagtggtaaagggaggagatgcggtaccaacagcatctgattcagtgaggcagtatagctgtgtcgatctttcctaatctagagggattctgaatgagtcggagggtctgtgaaggtgaagcattgcttgcttgtaggctggttgtcaaatctccttttgtccctttcaggcctttgtccctttacccttgtcaaagtacattcgagaactgcattacagtagggcagatcatcaagagttatgttagagaggttattgataggttataagccatttccccaattgttacagtcgcgtagtggagaagatcgagacaatggaatgttcatctataacatgtttgtcacactaggatggccagctacaacatgttgcgtccattgcgacaatttgctaaactccatttctaagtagcgaatactgacgcctgaatgactttggaatggacatcatcgcagggcttggatccacttggcaagaataaatgaaaggttaatctgaggaaaatgcagagttgcctaatggccttctggatgaaatgaattgttggtgatagacagtactttgtctgtttgcggagggtgaaacggtcgattaagtgactgatagcgaggtgcatcgactataaccactctaggctctagacgactagcttgactcgtgacatagcgtggtgaaatagctctcgtaccttttccactgactagggcgcatcgccaaggaacctattggataatcgctggccctcgcaatagcggtctggcgtctatcgcatcccgcttggggaatccacgtgaattcccctcaaatgacatactttaagtgctttcccattttcttcttctctaactgatatcaacatggagatcgttcaaaagaacgaggccttcaaaagggttgatggcgaaatgagattttcctacgtccaggttttcgttcgaaaagatggcatgttatattctggaaaatgggcaaatcgattcgctctaccggagacgctggatggcctccaggaagtcaagcaaatcccgatagaggacagaggcccagaggtggatgccacttggtctgctgtccatgtgaaaacacccagtctcctcgcatatgccgatggaaaccttgataaacaaatcactcgcgaaattcgaacatgtgaaactcttcgcaagaaccctcatccgaatattgcggcctactatggctatacagaatcttgcggtagagtctctggactatgcttcaagcgatatccatccacgctacttgaagcagtcaatcctcgacgccttggaaaagccgctttcctttcaagtgcgcgcgacctggtgcgggagaatatgaaaactagtttagacgggattctagccgctatcaaacatcttcactcgcttgggattgtccataatgatatcaaccctgcgaacatcatgcttgacgaggacggtacttttattctcatcgatttcgatagctgtcggtatatcggggaagatttgcgcatcactaacacgaaaaggacccaccattggcatgaccctgctgtgggaatttcgcttgtgaagaatgaccttgacgctttcagagagctacaaatctggttagctggctcgtcggatgaagaattcaactttgtatgatccccttgctggtaatcgggcctggtggtgatcgcggggatcttgaggaagggacggaggaggctgggtagcagctgccatcgcaggccgcaaaacacgacaacatgagacggagagcgcgaaggggttatctcttgttcagggaagaccatctcaattatctcaattattcccaagatgcgtctccttagtggatcattaccgcgattcatacaaccacgtctccgacaaggacctctggcattttgtcggcctaaccacgcgatggctgagggagaagcaatcgaggagcacagcttgccgcgctgtcgcgaaagacgttgctatcccgtgcgaggtgttcaaagaccagtaccgggttgttgcaaagcttggatacggcgcgtattccactccgaggtttgcaaatcctatccgtttcaagactgtttgtaatcctattactcacccacttcatagggtaaagcagtgcacttcgcccaaagtgactgttagcaagatacagaatcggtttttaacgagatcaatatgctgcgtcgcttgaagagattcgctgacaccgaacgcgaccttcccggaattggctttacgcgtcctgccgacgatatctttgaacctggtatccgaaagtgagggctaattcgtacgagcttatccaagacgagtgaatgatgaggcctctttcggaggaagatatcgcagactgcatgggttaatgagatgtccacgggtgtatgtaggttcaacggttagtgtacctatgtactaggctacctccagaatattgatttgatcaatggacatttatcccacaagagaccttcgaaacttgaatacatgagactacctaggaaccctcctttactgaacacatccaggtagccccgttagatacagcacataatctcccgggactacagcgccaaactccgagtccaaggtagtgaccattaactgcatgataggtcccaaccatatggcagcgctctagcttggccttggatcccaagggcacgtcatagtatggttggtgaactttgcgctgcacaacatagagagtcttcccaggtctcagtcttgggcatcgcagcggctccagcagggctagccactcggagtgatccacttcatcaccaaataagataccagctccttttccatctctgatcggtttcaggaggtagtcagtttggaacacatccgaggctttacaattctcgataaatccgtccaaggctgtcgaccccggtagaatcgtgtgagctaagcctcgccgaagccattccgcctgtttagaagtgataacgttcctacagactaaatcgttaagttcttcaagaacaagtcccagcattctcttgtcatgggcaagtaggatagttcgcatgtcgttaaaacatcgcaggctgatctgacgtctcatctccggatcaagagcattaatctctcgctggtgaagttcgagagaaatctggtgaatctcttccacgatctctccggactcggttgtgattgttccaatagcgtctccttcagcgaggcaacacagcttatatccctctttcccagactgggatgcatctgggataagtcggagagtgtccggagttataagtcggggttttatcccaagtcttttctgggcaaactcgataaacattgcgatatcgatcccgtgttcttcgcttttaacaaggtgtaaggggatcttgctgtcaaataggtctaacaatccaccaaggatcttcagagttcaagatcgttagcaatctgcctcaacccggcctttatatctctatcactctgcttaccgtttcaccttccacggtatgaaccaggccccgcgacccaagattaaatgccgaaagtgagtcttgaccgaatccggcatgcatatacccattccagcagaacctggcgttgatctcgcaaattcgaaatacctctataccagcgtcatctttctccaccaaaaagtctggtctccaagatccttgtcgctcattccatagtgggagcaggtctcggtttgagtctaaccactattccaagaaccatttagtataccataccactataatagaagggatcacgactcacgcgcaataggtcttcctcttctgactccaacggcatacgcagaggaaagcgggcttctctatccgtccaccatcgcttgataatatcctcgattgccgatttcagggcgaggtgcaagtttctcatatcatcatcatgtcgttgggtggtcagcacggggcaaggacacgatgcatccaaagacccggctggccatgaagaggagcagttgctcagctttgagatgtaacggctgcggttttggcttagggagttcacgtctagtccttccggcgacacgggtctgtagtccacagaatctgtaaagttgatcagatgaagagggtcgaaagttttgtttcgcattttttgagtagatgttgtgtgtggggtaatggggagatgagggtgatatgcaagtccttactaggatcaagctatcaaacgaactacaccgcagcaatccagagctaagggaaaagattcacatctcgtatattgtagatccctacttcctacatggaatataataggtctagggggacgaatacgagccggttatttacgttatgtaatgtacggtggagcagccattgcaaaattacatttttgagatcgcaaattacaatacgacaatgacagggttcatgagccgcagggcccaaacggtgtcgcatcccatcggactcgccgaagatgtcggttaggatccttgacctcattacgcgaatgtaaccatcgacgattatccatcatgataattgatccttggggaagactctggggtggcagatggagactctcttcctgggcaccgctgtacagaatttctttcagttcatccagggctttgctagcatccagagtcaaaggaaccgtgatatcttcccgaaaccgtaatcggctgccggaactttgacttaggttcaccgcgagcagattgcccacgatgtactgtgttctcgcggttttggtaaactctggggggacgttaatcttgtaattatagctggagagccatcgttgcgcgaaaggggaaagcaaggtgagaagccgatcgacgttcaacacggacaacgttcccccgccgtaacgatccggctggaggacttgaagagcaaagaatcgtggaggttgctcctcgtagctgcagtcggtatgccattcgaaccgaaacatagtctctgatcgagtttggtggctttcgaaactcgtaggggagggccgaacatcccagaaccaaccgcgctcggcgctgtgggttattgggagaccgtggttgtggttcttgtgcagattggatatcaggctccgcagatatgtgctattctcgtcgttaaaccccagttgtacttgaaggatacctttagcttcaagggtttcatatatgtctctcaagtgagaggcgtcagatgcgagtgccggtttggcaacctcgattaggggtacaagagtggaggttcttagatctccttttcatggttagtataagagatggaaaatttctgacgagactcacggacgggatgggtagaatagctagcagtcgtcactttagcagtgtgaacaacacggaaaaggcgatgcattttgcgcatccaccacagatagaaaggctccggggcatagaatggcagtctgcgcttcaactttatataccaacagcttcaaataaaccgaaaaaaaaaggacgaggcaaataatgcaacatagagcgatgcagttttagagattcagatgcgcccctttcgaccggccatatagccctgtaggaaacgagaggcgcttgtaatgagcaatgctgtgtgtcgggcatgcagattgagtaatactgcatactccgtaattcaaaggacttcagcttttctgcatgcaaccttggatgcttcgtgggcgggaaaaatatccaaacgtttgtgacgatcccattgagagtccctctcgtatatgagggaggctacgctgacccactcgggaaatagttacggagatcgtactccgtattgaacatgtgtttctgttaaggggagaaaaagaaaacactgtaaatactccctatgcatcgggaacctagcgtggttcaaattacgatggtccagtattgtgtttttgcaaaaattcaatgtttccatgtctctctcgcatgcatggatacacgtgtttcagccgatcaatctaatctacatggtccacggatggcacttatttcgaacttcagctactcctgtacttgcataatatattgaggattaagaccctcagtttcaatctgagtccctcccaaccacaataacatatcccccatttcttaccatattgtgtttcctgccttcaattgagattgtccgtagctgattcccgcagcaatgacaacagaaagatactcattggcagaggtgctagccgtggcaaagacacaccctttttacaacccggacattgtgtaccccgccgatgcagaaacgatcgagaatcttcggaaggcggtcactgaccaaaaggaaaagcctaaactcatagagcagccacttcttgagaagaaagcactgtaaggcaatgcgggcagaccttacactatagctaggctaatttacttcaggtacaaggccattgaacgacttacacatgatgtgaacccgcgaaacacctatcgacaaagctcctatatgagcattaccggtggtggctctggtggagtgcccatgatgtttgccgtggacgtgcacgagaaccgtcgacagcgatcccaaatgggggaatttcttaaactgtgcggagtctctcagcccggagattgggtcttgtccattcatacggccggtggcttttataggtatttaggtccgaatcagtacaagatagtggatatcctaactaagaagcaacaaggtccctcgatcttatgacagaaatcatggagaacgccggggccacggtccttagcgccggaagctatatgccacctaaagatgtcgctaagtctctagccgactaccatgtcaacattctagccggcgacagcagccatgtcgtccagactgtctaccacatctccctcatggcgaaggaagaccgtgaccgcgtcagacttgataagatcatctacacctctgaacccctgaccggtccacagcgagcatttatcaagacgattcttggcgaggtcaagataatttccgtcatgggaagtgccgaggcaggtccctgggcaatcagcagcccggacctaacaggggagcagagcctgaccagcaatagcacggacttcgtcatcgacacgcgcaatatggtagtcgagatcgtttctccatctgtgatcgacggcgtctctacccctaatccgatcctgcttccacagggagaggaaggtctcattgtgcagacgtctctccagcgactgcgcaacccgctagtgcgctacgtcactggagatattggctccctccacccactcccgagcgcagcctgtgctgtaatccccgaggctgactggggccatctacgtgtattgcgcatgcacggccgcgaccctcgcttcagcttcaagtggtttggtggctatttcgagtttgataggatttctgccttcatgcaggaggaagagtgtggcattctgcagtggcagatccttttgggccgattggagagttcaccgcaggcgacgctggaaattcggttacttcggtccccgcttcgggatggcattttatcagatgacgctcttatcaaacgcgttgaggctttcttcatagtgctccctgagaatgaacctctcttccgagtcgtgtttctggatggtcttggagggtttgaacggagtgctactgcggggaaggttatcaaatttgtgaatcagtgggattgaaccttcccaggttgggagtattgtctcttctgtgttgatcatgtcgaccgaagagactattgagcggcgataaacgtcgcaccatacggatatacggatactacgtacgaaaatttctataaagctccgcaaagcgactgtttgtacgagtatataccattgggattattagaaagtagcaaacgaacttggttgactctaaaatgggtctaatttagtttgtaactttgtttactgaactaggccttgggtgtacggattgggaaattcccaagcaatcgcacaaacagagaatagggtatagttcttggcgccgagaaacggttctgaatggcctatttctctccacaatatttctgcttattggaatagttcgagtaaacgatccaatattcaatagtaaagtcattggtttccaaatagggcttcccataattgtgtctacagcacagaccatccaccacgtttgtagtattccataaagagcacggagtactagtcgagattagggaatccccaaggcacactttttactaagataacgaccttggaaacgcccgtatccactcagatgcaagtctaaatgcgtgattaatatatagcgggtcgaccggtctgtgcgaacagaacatcgagaacgtccagttgtcgcgtggtctctataaaaagaaacgttccacgtcaaataggatggttatgttcagagtatatacgggtactatctgagttcaatcctatccagtccatattctattaattttcagaaaaatccagacctagaatagtaagatgtatagatgaaacacatacgcattgtcttagcctctccggatattgaggcgctaatttagtcgagttctccccacaccccccttttcttttctgcaaggcttctcttcttctctgcactctttatgacttctggggaattgtatcctctttactctcattcaattgatttaaatctctacattctttaaccccccactgtcccgctagcccgattatccatttcagaccctgcacctcccggaacactcctgcatatcataagtctcggcttttagaccagcgcttactgaaaccactatcattaccgagtaagccctctttcctacatatgtaggatatttatatatccacaggatgtcaagcttgatcatcagggactgatccatggttctgcgcagaaacgtcaatttttcctccacagctccgctccccttacgttccacgttccacgtgggatcgtcgtcttctatatccaagcatatagcatctagcattctctccaagtttctagacctcaattcttgaggatatccatcactgcatttcaaccgtcacaatgggtctcatcgacaagctacaagccagtatgttccgcgacccccgagaaaaacacccagcaaaatgccgcttcactgcggaattgaaatgcgacctcgaaatactaggaaagataactaatatcgaagtagaactcgagctctaccgcctcgaacagcgctatgcccgccgcaagcaccgcagcaccttctccacaggagcccaatacgtcgacggcgaatatgtctactcgggcgcaaggtcgcctactagtaccgtctccaagcactccactggcagctggcgcccatcaggatggggcagccagacgtcgcgatagcgaagtacatttcaagtcgacatgtctgagcgattaatttgtgttatcggcgccattcgttttcttctacttgtctttagcattttcaccctttttctctcctttctgaaggcctttttcttctgttctatacctttgcgtgatgcttccgcggagtctcgacgaattcttgtacagccacacaccatgtctgtttttctttttcttttctgggattgtttaccttatgatttctatgtgtcagcggggagccatgttcgaaaagttgggatctgctctctgctttctccttttggatcttgatatctcctgcgatatgcctgcttggtcatgtatgcttctcatctttgtcttgtttcatagtcttcgtttccttgggctttgatgttcgtgctcaatatctgagatcccctcttgttcaaacactcagtgcaagaatagttagctgctcatgtggcttctgtccctgacggcataagacttcgataattcgatctgtttggcccaagaaggcattaggaactcgaagtgtctttgcatgtccttttaggtgtttctgtaggcgtctgcaaggcccatgtcttttactacctttgtatacatgtagaaagggcgctccaagtagtcaagatcatgtttcgaaggtcggtttcggttctttgttcttggacttctttcatcttgctcaaggatggattaccgcacaaacagcagggagaataagacatataaaaaaagcattaagtccataaactcattacagattaggaaccacctgcaggtgtactggatttaccttcagaataagacccgtggacctgaaggcctaaggcggtaaggctcgaatctgcggaccttacgtcacaccaccgctctggtctctccatctccacactgccaacgcatctccctcatcctgtggttgcatttttgcttgttattacggtagaaaagccgccgggcaatctggaccttcttgtgcgctcgaactatcgtcaaatttaccgctcatcctcgactttcaagctcctgaccgtcccgcgacagccaaaccgccgagatacccttcgttcacgatgaacattgcttagccgaccataactggggaaagattgcagcataggctgccttgagccatggatcaagcaatccagcggttattgaacgacaagctctacgacaggaggaagcagggagctctggagtatgccagctcggttttatcgctccgcacttgaaacaacccatactgatcactctctatttacactaggcttgagaaaattgtccgcgacgctgttttccaaggagagcaggagaaaatacaaaaaatcgttgaacagctctgccacgactatgcgtacgccgtgcaccaaccccatgcccggaatggaggcctaatcggattggctgctgcctcgattgcactcggatcggtaagtggtggctatagtcaacgtctcgggggacatagtggctgatttctgggatataggaaggagttgcgccgtacttgggtgaaattgtgccgcctgtactcgcatgcttctccgaccaagatgcgcgagtgcggtactacgcatgtgagagcatgtacaatatagccaaggtggccaagggagagatactgttgttcttcaatgaggtttttgacgcgctggctaaggtgaggggtgtagattgtttcaatgagatatcgcatacgctgacatggaatatagcttgcgtctgattcggagctatcagtcaagaatggcgcggagcttctggatcgcctggtgaaggatattgtggctgaatcggcagcctcgtatgtgtcgattctacagctccccgaaaaggaagctacagaattggagaatcaggaagaccaggaacttcccatggcgttctctctcgcacggttcattcctctgcttaaagatcggattcatgtgatccaaccgttcactcgcaactttctggtctcatggcttacccttctagatacaatccccgacctagagctcgtgagctatttgccagagttcctagagggattgattaagttcctgggcggaccgaacaaagacgtgaatattgcaacccagggtttacttgatcggttcttagcggagatcaagaggattacccgacttaaaaaggggattgaagaaagccggaagagtcagaagagcaacagacagtcggttgccagcgatgtgatgagcaacgcgacagagcaaaatgcccagaccgatggtgcgagtgacgacaggtacgacgttgccgttgcagactcggtctcagatacgaccgtcgatgatgagatcgctcaagccgatggagattggatcccgggacaagatgtacaaatcgaccaccccaagattcttgatattcttgtcggctttgtcaacacctcttatggtatgcgtgactctatctctctggctttcatgtgcttacgttcgttttagaggaggaaatgcaattgacggcccttcgttggcttgattcctttttcgagatcagccctgaagatattcttcctttcgttccgcggctgttgactcaggtactcccagccatgtccagtggctcggatcaagtacgaaaagcagcaaaccaagtcaacacgtcccttgtccaatacatctactccctgtcagatgacacgaccgaggaagcccaggcgccatcgtcaaagatcccttccgccacagccagcaaagaaaccatagagcgaagatcatcgactccaggagtcaggccttcagagacagcgagcagtgacacaaagaagcagacagtacaagagaattccgttgcggctacaccgcgtagtagtgttgtttccaccccgctgcctcctgctgaccttgactacgctgctgctgtcaactccctcactctacaattcctcaacgaaaatgaagccactagagttgcggcccttgtatggctcatcatgctccaccgtaaagccccgcggaaggttgtcgctttcaacgatggtaccttcccagctttactaaaaacgctatccgacccttcggaggcggttgtaaccaaagatttgcaactcctttcacagatctcaaggaacagcgaggacagctattttacctctttcatggtcaacttattacagctcttctctacagacaggcatttactcgaagtgcgcggaaatctgatcatcaggcagctttctctgaacctgagcccggagcgtatatatcggactttggcagattgcctcgagaaggaagaggtaatgttcgttgcacacatcgaggtcttctatgctaatgtatcatcaggatctcgagttcgccagcatcatggtccagaacttgaacaacaacctcatcactgcgcccgagctctcggaattgagaaagcgcttaagaaatctcgattcgaaagtaatacccccggtcaccttgccttgcattctcgagactaatgaaaacgtttaggatggtcaaatgttctttgttggacttttcagatcgtggtgccacaacgctgtctctacgttttcactctgtctccttgcccaggcctatgaacaggcatacaatcttctccagatcttgtcagtataccggctccattcaccatgatagtctgctgacaagtctatccacagtgccgaattggaaatgacagtcaatatgctaatccaaatcgacaaactggtgcaattactagagtcaccagtattcacatgtccgtttttctccgtcaatacaacttcagtcccagaagctaattccaatagatctccgcctccaacttcttgaacccgaaaaataccccttcctctacaaatgtctctacggcgtcctcatgctcctcccccagagctccgccttcgccgccctcaagaaccgtctaaacagcgtcagcaacatcggattcctccacggcggaacccgcaggtatggcccctgctccccgcagtctatcctaaggtttactgagacgaatttccctagcactacccaaacagccccgcccttcgaccgttccacaggcacccgcctgaaaccccgcgacgagaactccatccgctgggtcgaactcctcgacaagttcaagtccgtccaggaacgagcccgtcgatcccaaggctccacccgccagtccttcgatcagtccggccctatcaacaacccctctcttacagctgctctctccgtcgccgctgcagaccgtcccaaggaccgatctggtctacccgatgccccgcgcggtgccccgggccctagtaacgctgctgctggaaacgccgggctgggaggctctggtgctggtgtcagtggcacggctgcttcgcgcgcgttggacagtgcggcgaagggtgcgtcatctactcagagacacagatcgggtcttccaaatctgggccggctgggtattggaggacggaggtccaagaaatagttgcatttgtagctcgagctggaacttgcctcctgcatagacctttctttttgtgttacttagctggatcgttttgttgcgaccatacccgagatcgttcttctgtcgatagttattgtctgtgaataggtagcgatggttctcaatggcatacatttcttaccctctcccaaatgtgtctattggctggataccttgctatacgtttagttatctttgagtgtggtattcgtagcctttcatgtttcggcagcatgtagctctccgcggtacagagacaaaacaaaatcattgaattcgttctatggtcataattgttcgcttcccaaatgaatacgctccaaaagatacaatccacccaatactatagttgatctcgaaccagcccaagtatgccaaataagtgtattaatgactgatgtactggaaaatagccgaaacatcctgttccccagtctcctgacgaagaagcagatcctggatttgatggagcgggcccttctcgccggtgttgacaaaatggttccacgaactcgtatcaccatacagcatagcgggagccttgatatattgcgtgccgtcgggccgacaccgtttgcacttgaaggtatcatgggtgtcactccgagtatccggtttgaactggaagagttctcgcagggaatcgagggagaaatgacgctcgacatcttctgcggagtccacgacacacgatgagagggactgtttgtgggactggcgctggaagatcttctcttcgattgagcctgttgcgatgaaccggtagacaaaacaatctttcttctgtccgtctcgccacactcgtgctagcgcttgctggtcagcggctgggttccagtctggatcgaatagcaccagccggttggcgccgatcaaattcagtccacacccgccggctttgctgctgaggaggaatacaaattcctgaccgtctgggttattgaacgtgtcgactagctttgtgcgctttttgatgttcatggtgccgtcgagacgcaaggagccgtaaccccgtgaccgacagagcttttcgaataaatcgagggtctgagtgtaattactgatgaggacgattttgtcgttggtgtcttgtcggattcgggctaacatgcggtcgaggaccatcattttgccagagtaccaactcttgatgtctctgtcgcggccccgagaatcggggggtgaataatcctcggggaatgcgtgctcgcatcctggaaggtcgttcgctagatcgagtagatctgggtgattgcaaagctttttcagaataccaattgctttcagcggctgactgccttttccgcgaagaaggctttggatctctggactcttgatgaaatggttatacagaccgcgctggaactcagacatgttgcagaaaacaacatgctcgtacttgatgggcaagtattttgagaggagctcgttggttcggcggataatgaacttattcacaataccagagagttcctgtaatctttcatcccccagcttcttttctgcgtctgtgcctgcggcatcccgaccccgtagaatgggtagttcgaacctcttccggaactcggcttgggagccgagaagattcgggttcgcgaagtgaagaagagcgaagtactcagacagatcattctggataggtgttccagaaagaatcactctgcgagtaacgttgagttggttcaaagcagtccatgtcaaactttccttgtttttcagtcgatgaccttcgtcgcatagaagaagtccgatcggggtgtcattcaaagtatccgcatacatacgaagtgtctcgtaggacacaataaggacgggcctgacgattccacgccctgatgcaatggcccactgcttgatctgggatattaattctgctttcgtggcctttccatcaatcgcaaagggtgtggtggcgtcttttccaagccattttactgatatagtcagtcgagctcacaagaagtaaggtgccacgcataactcacccagttcattggcccaattaccaaccaaacttgacggacatgcaatcacacatttctgaatggtggtttttcctgcttctgaggactgcttgagtagcgtccacatcaatgcgatgcattgaagctgtgttcgttaggaccaaggtacgaaagtcggggttgcccaagctcaccgttttaccaagtcccatgccgtctgccatgatacatccatttgcattcttgtcgaccagcccagtcacacatcgataaaggaactatggtaagcgtaatgtcagttttactcccacaacacagcgtacctcggggcgcaataccttcacaccctcgacttgatgtggccgaagcactttggacagtctcgggtcaatcacaacaggcacctttggcctatcttccacattctttttgagccccagaatgtctgctagactcttatgcacaattggctcatccaattttggcgtgtcctccgtcggtgcctcctggttttcgggcgcaggttcctcggcgacgtcgtctaccgtagggtcgtataaaacaatcgcaaattctccactagggtcatgtagtggctttaccacaaatgtcgcccctcgtcgcattcccagtgtcggagccacccgaccagaactgtactcgccggtggctttattgaggaacggaacctgaaatcgttgcctgaacgccacctctttgtcctttggtttgtaggcggggaatttgttggcctctcttgtttccaaagcgaggcggtcatcattcgtgtatggcttctctccatcttccacgcttccatcggcattggcatagttgaccttccttctctttcttgatggcttttcagacgcacgagtgggtgttgcgctccctggacatttgaatggtcttacaagtcggtcgatcgagttctgggagttcacggatttcggttgtaagggagtcttgacgctgttgttgtcgccgccggccgggcgttgtcgataccttccaggcatgtcagtatcaaaagtagaaaatgattaagtcgaggacttacattgggtccaaaatatatgaaacaaatatccaaatacaccaagcgcctgctgtacaatgattccaaagttgaggcaggtgcgagttgtcgacgcgtcgcgcgttacgttgaggctcccaaaacaccaaactgccgcgtcccacaataactgaccgcccaatggggtatggtggtccgagctccacgtggggcgttatttttaggaagtcacgtgcattctgtatatgcacctaaacaacaacctgaaggctgcggaaattgctagttagcaggcaagacatgcatacatgcaatgcatgcacggtatgcgtctgtctctatgagcagactgagctctctgtatgcagtgagcattcacctagtttgtctcgtttgtcgccggcttatataccgcctccttttcatagatacatcatcacctctcttcttcttaacgtttttccatctatctctcttgcttcgtagcctcaacagattacgaggccctcgtttttccccttctgctagattcatcaagatctaagccgactgacgagcttccccctgcatcggggcctcgctggtaattttatggtggagaatagtaaaaggctatatctcacttcttccaaagtcgcctctgtgcgaagccagctgtgtgcgaaaatttcaaaaccgcctgtgtgcaaaccagcctgtgtgccgacagaattcaaatcggtgttatacagtgtctatcattgagaaccgtcttcaccttcaagacttcattttttgactagtgaaaagctggctggatccttatccttatcttcaattttgaccggctaaaagctggccgggtcttcatcttcatcttcatgtttatatttatattgatatttaaactccatttgttttcatcgccctaactgacgatgacagcaccgcttagactatcggcaaacgcaggaggagttctggccatacctgcttgcgcagcgagatgagattgaatcagctgttggctcgtaagaaggccgacaaaggcaaggggaaggcagtcgtgcccggtgacgcttcggcggctactattagcaagggcaaagggaaaagtaaggctactcccgttcccgcaaccccggtcaagaccgctaagggccctaagactcggtctaagtccacgaagaagcgtctagctaccgatatcgccgacaagaggggggggaggggggagaagaaaaagaaagctaagaatactcccgctccccctagtgcgtcgtataccactccccgctcggggccgtccttcgataaggagttgtacgcgaccccgcttgactggccggcgatctctcgcagtgaagatagtgactggttcaatgacgttttcgcccgtctgcgggaggtgcgggaccgtgtgcgttatgacatcgacgcgatgcagaacctgggcttcgcaaggggttggatcaatgaaaacgatgtggtggactctgacaaactggaagtcatgttattttgaacctctcctgatatagataggtggacttagtgacaatggcttgactagaactttaagagcgcaataacatgtatttgtagatataatgtataacactagacatcaaattgaaaaactcccaaactaagaccaagccaaatgcgaatctcctccaaggcagtcaggtcattctcgggaagagattgctgtatcttttcatcatgccattcataagtacggccgacatcttcgaggctttctctaatcttccggcaagatccaaaatcgataatgactgccctatcatcggccaccattatattgcttggattgaggtcgttatgaactaaacccagcgagtgaagatgatggagaccactttcgacatctataagaacacggctatagtcctcgctcacttcccgcgtgtttcttagtgctcgcttcataagggcgcctgggtcgacttctttcataagcgtgcgagggtacttctcaaagcaaaggcccgtgattctgccgttagaaacttgacaaccgagataggtagcaatgttaggatgtgggtgctgcattaagacttcgcacacccttgcctccttaaggacatcctctgcaatcgaattcggtcgagggccttcactaacccggtcgtaactaagcaattgaggctttttgatgtaacagctgttgagcagattttcaggcgctagcgtaaattcgatagaatagtcggggttataggccgaggtaggaatctgcttgacatttataatgtcgtctgcattgatatccgaaggcgaagaggagcggcctttcagcctcccgtggagcaaaaggccatttaaccggtataaaacgagagtacctgcgaactggtaaccttcatctgagtcttcgtagctctcggccttctccagtatctccagtctctgattaggaattggcggagtcggcatgcttaaatgcactttgcagtgtcaatcgttgaggcataccaagggcagatagcactcacctcgtagtcatggggcggaaaggcgaattattctttggcacagatgtggaaaggtagaccaggtgcctcattaagagggtctgtcatggtatgaacctgcggtctcagggtccaccgctttttcagctggaaaacggcggtctgtgcagtccttgtgacggccaatagtacttatttgccaaaagccagtgagaaatgtgtaggcaccaatgatcagtatggtagcgaacgcatggcttatttcctaggggccaatgagggctgtagcttttgttctaggcgttgacattgactaaacaaaggcaccatttagtactggcacaatccagattttgatggagcgcaaacgaaaaacgcgacttttagcgtcctgcactatcgacaggggtgtctcgaaaagtgcgacttttagcgcggggcatccaccggagagatgtcaggtttaccgcacaaactgatatggtacctgcgagctgatggaaatgagtaagtgcaaagagtagtttggacagtctcaggagatggggaaggtttatgtcagttctgctgtggccggtcaatctatcacatcgagtggccagttgctatataaccatgttgtaagcatcctttcctgcacctcagtgaaaccctcaatgcttttactcaacaatggaagccacacctttgccttccctacacgcaatagagacgctaaaacatttgccacgcacaggatggctgaggacgattcagaaccctaagagtgtggcggcgtatagctttcgggtagctatcttggccatgctcgctctggtgatttttccctcgcccgaggtcctatcgcccttttagctgctgacctcgttaggataactagaacctagatgtagggaaatacacgagatggctttggtctatgatttggcggagtccctcataggagatattctaactttcgtaggggccgcaaaggataagtcttggaagtttttatatggataacataatatgtattcaactcagcaataatataccggaatggtaaaagcaaggatgcagcatgattggacgccaaacctcccaattgtcggaacatccattagcgagcccataacctggactaccgggagacccgtaataatactgttgttccagcaaataacaaaagcaaaggattcagaaaatgtgacacaatcggcagtcaaagaaaattgagctcagcaatgaaacgcaaagtactcccgtcgaggacaacatcgtgcatatggggtggacgactggggacgtcgaagagcgcgcaaaacggtatgacaagaggagcgccgacgacattgtggtcggtgatttcaatctctgcgcaagaatacggttgttggatacctaggggctgtcttgtggagggtgggacattgatcggaatatcccgcaaggtattgatgtatgtccgagtcaatggatgtggggcatcaggtggagcgagctgccatttttcgatgtgtacagcacggttggtgacggagataagaatcacgatccgtacttggccttctgaggaaccgaaccaccatctagcgtcttcgacgagctttggtcgggattctgagacgcctgtctcaatgaccatggttggccagcttaatccatcgctagatggccaacgttgagcagggctaaagacttgatcaccctccttgccgcgtgctgtggatttgtaccttgtcgctccgccccaacggtaatattcgttcaatcccatacgatcgagttgtagattgattttttgtagcaggccggtcgttgtgtactcgtgtttgtacccaggcaccaaacgcagaacaccaatgtcaccttcgaactcgaagcggtagtcgatcccttcgaggcaacgatggtcattgaagagtcgttcggccatttgtgggcgtaacttgaggagaaccaagaactgatttccgctgtattgtgcatcttgttcgaacttttgcacgatcgtttcagcttcgagcttgacgtgttggaggcgtttgaatacacgaacgacagtatcagtgggtaaagctgtcatgagagagggcatgactgacacaggcgggagtgctagttgatccatggtgaggtcaagggtgagagctaagtgagagtgagagcaaagtgagagtgagagcaaagtgagagtgagagcaaagtgagagtgagagcaaagtgagagtgagagcaaagtgagagatagctcattgccagtcccgtcatccaccatgccgtctgccgagacttgttgggggggggaggggggagtgacactgcagatatcatttcaggatccagatctcggaggccaaggctagatatagactatgcagctcacctcacattggaagaggaatatccaccagctgttgtgcatgcattcggagcatgcatcaatgagagattcggcactaagcagaaaccgaggaagccgcacatagatcagcctcccttgaggctatacgctagcagggggattcacagacggaatgggtgtagaacgcctcaaaacaggtaaggtatcaggatcggtcagggggaatccaaatcaggttccatcttgattcagtaaaattatcaatgagagaaaaagtatgacgtcttcttggcaatgtttaaggttgagatgagccgatgtcaaactgggagacatgatgaaagaggaaaggttgctttggtgggggagacgctatgaataccaaagagtgaatggtcgataccatttggggaaggagtgtctatggaaggagcgaaagggcctccgacccgatggcttcatatgtgtcatcaggtagttcttggaagcacttgacgtcggcggagtccgagtcatcggacatatctgaatgccgcgacatagtggtcaacgtggattgagggtatgactggcatcggatctggagacgatgatgtgtgactgagcaactcggcctcatttctggcctcatttctcggcagatataatcctccgcgcccgtgttttggccccgaggcgtctattcaaaaccctttgggatttgagaccataacatcggttcggtttcagcagggctaagtggagtcggcaaggggggctgattctcacttcgtcggtcatattgatgaagcagtggtaatcttgatgttaaaagcagtgcaaaagatgtaaggatgatggtgaagtgaagggtgggtgaggataagaggtgtgagacagaggcaggtctgtaaatatttagaaagaaggtaactattgtcatctcagatttggtacgcccctgtcacattcactgaattctttgcttttgccatgtcctagaacccattgctggaagtacagtattgttctggatctactaataatccaagttacaggctcgctaatggatgttcctacaattgagaaatttggcgtccaatcatgctgcatccgtgccttgatcattccggtatattattgccaatattgaaatccatgttgacttctatttggcatcaaataaggctaaggtgtaccggctggttggtatagactgaaatgcagggaaatagtcgtatttcccttggaggttgttgttcaggtgtgtaattctcgcgctaacttaggtaccttggtaggtacggagtacttctaatgtgatttataagatgcattctaccactcggctaaaagatcatagcaacaatcgtaacgtccgatcgtagctgtagtggtatatatactagaccctagccatcgctcgggatcacatactggtaatcaatcgcgcacgtgaggggtcaccccactatggaaatctggggagcttcgaatcgacatttgcgtcaattatctccaatctgggccttagagctgagatctcatggccgcagacttctgggctggctacatcagcggagccattggaatcatcatcggtaatcccctcgatgttgtcaaagtccggctgcaagcaggaaacgcacatgcagatgcatcgcccgcacatctgagccggtttgaaaaagcaagctctctcgttcgaggtctgtgttacactgattcgacaccaatagcagtcaattgatatcattataggcgcagctgctccgatcttaggctatggagctctcaatgctattctttttgttgcatacaaccgatccttagcagcattggacgggtccgtaacggatcccaccaatcccgtgggggtctcgccttacaagatctggctggccggtgccgcaggcggactggctagttggaccatctcatccccaacggagttcatcaagtgtcgggcacagctggatcgccggccagaagtctcctcgtgggcggtcgccaaggatatcttccgaacgcgcggttggaggggtttatactttgggggcgggattactagcgccagagattcaattggctatggattctagtatggaactcacacgccacccccagataccccagtgtatcatttgagggattcagtgctaacgtagcgcagtttctggtcctacgaactttgcaaacggtttatgacctctgatgatgatggctcacaccaggccgctatgaagattctgctttgcggtggcattgctggcattgttacttggggctcggtgtttcctttggatatgatcaagacaagactgcaggcacagacaattgcagatcattcgcccagggcaactgaaagccaatctctactgcgatcacgccaaacgctaagttctttccagattgcgaaagatacatatcgtgcagagggtatcaaggcattctatcgtggccttggagtctgcagtgtcagggcgttcattgtgaatgccgctcaggtatgttttccaaggttctccatgttgctatcataatcgattaaacatctaacatctgataaagtgggcggcatatgaatggttgatgaagagctttaatcattcctgggacgcacaagtgaaatcccaagaggccacaacgggtctgtaaatatgttcaacccagccattcaagcgtatagaagatctggaacatatcaaaacattggaagccgagctacgtataccgaaagccgagttaggttagaacctatttggtattgagggatttctattggaattactcggtagtattgctagtaagggggtaaatttcgccccagatgccgtttttgccgatgttcggcggtttcgagtcacccgcaaaccggaagagcgaaaacccggcgagtatcggcaatataaaaaaaattgcttcacgtgagactccaccgatatgcatgtacggaagaggaagtcaacatcagaataggtctagatgtattatcctggaaacttttgtatgtcgatttgctggaaagaatatcgtggtcgcgtagcaaaggtctggttttgatcccggaaggcgaagctcaagcttcgattcactccttcatctcgtcggagttctcttcgcgcttgccgttgtcgacaagtcccagtccgatcgcacgctcggcaagcaattggctgtgaggctcctcacgcaggatacggagtctaaataaggcgcagctggtcagagaatgcgacaaaagacatgtcggaatacactcacctccgcttgtggttcttgcccttggtatgtgccttgaggttgtagtcgctctcaaaccatttggagcactctgtgcagtagaatttgcctagcccaggcagatcctccacatccttcgagtccttgtactgctggaggtgacggggagttttgatatccgcgacgacttgatcatagtctctgtaagtgtgttagcaatcagcgccaacaataggtacaggtataacccctagagaagacatacctggtgcggcgcttgttcttgactcttctgagagcacccattgttcctgatagccgaaatacctcggagctggagccgaatatcaaaatagatgcaaggaaacgaaaattgcttatcaccgatttccggagtgaacggtggaggaaagcgggtcaaagaggctatggacaatagcaagtgtttgagatgaaatttccgccgattgtgggtcacgggcagcgattgaaacgcctgagcggtgattggctggtgaacagacacggcaccttggcggcgatgcgggattgccattcggctcacctcggctcagttgcatttcgtcaccgtacacccatgtatttaatgacgtttgcatgcggtatgttgttccagctatccaattcaagtttaatacaatttcgagttatataaaagatagatgcagctacagaatatagtatatgtaggatataacgatggcaatattgttttaatacaagctctccgcttgtataacatcatatagcatcatgaactagatatagtaaacacatgtcgcctgttggctgggttcatacttacgaaacccaccaaatccacatgccgccagctgccctttaacggtagcacggggtacaggccgagagagttacatgaaaacacattgaccttttcgaagtcagcccttttgtccgaaacgggagaactgggcgaaaggggtcttgtaattggaaactccgtgattggtggccgagttatacccgtcacatgccttgtatcgctgttacgttcccgttccatcccaaagtgaacacaaagggagatgttggatattggaagttcaaatgggaagagaacatgaatagaaaaagaatccggggtatattcctcttacaactcgtcatctatcataatagaccttgagtaaatctttgagaattctcggccataagcagcgtctatcaaattgcccagcccttcttgccgtcgcatgcggcaagcttagtccaataccagcgtattgtatcgccgtggtaacagcggttacggctctactcccggtccccgtagaatctttctcccactcaaaaccaagctttcgtcctcttcttcctttttgatctcttcctctctcattcaactctccactctcatacatactttggtgaaggtggttactagctcttggatgtgcaatcccatctcatagagcttccatcatgatctccacccgccttgcgcgcgccggtgcgctggtacgtttctccctcggctcaccgttgccacatggcgatctacctaggtgccagtctcttggatgaatggaaaactaacttgtgtttcaactataggcccccaagttccgtcttgtaagcagcgacctcattgccgagctttaactacacgtggcgtggcacatatgccggcgtgcatgatagctcagacatagcttagacctgcagttactgacttttgaatgtatagcttagcggaacccgggccttcgctaccgtcaatgaccccctcgacaagaaggtcgagatgaccaaccaggaaactgtgagtggctgccagcctaacgcctcgaaaaaccggcgtcgagcacgattccaagcaatagcgactgacgtattacatctcagggtcactacatcaactacaagaagatgtccgagaacctcgccatcgtccgttcccgtctgcagcgtcctctcacttactccgagaaggtcctctactctcaccttgacgaccctcacggccaggacatccagcgtggtgtctcttacctcaagctgcgccccgaccgtgttgcttgccaggatgccactgcccagatggctattctgcagttcatgtccgctggcatggaccgcgtccagacccccaccaccgtccactgtgaccacttgattgaggcccaggttggaggtgagaaggatcttgcccgcgccaacgagatcaacaaggaggtctacgacttccttgcctcctctactgccaagtacgacatcggtttctggaagcccggttccggtatcattcaccagattgttcttgagaactacgccttccccggtggtctgatcatcggtactgactctcacacccctaacgctggtggtctcgctaccgccgctattggtgtcggtggtgctgatgccgtcgatgttatggctggtctcccttgggagctgaaggcccctaacgttattggtgtccgcctcactggtcagatgtctggctggacctcccctaaggatatcatcctgaaggtcgccggtctcctcaccgtcaagggtggtaccggtgccatcattgagtaccacggtcccggtgttgagtccctgtcttgcactggtatgggtactatctgtaacatgggtgctgagattggtgctaccacctctatcttccccttcaatgaccgcatgtacgactacctgaaggccaccaagcgtcagcacattggtgacttctctcgcgagtacgctgcttccctccgtgaggatgagggtgctcagtacgatcagctcgttgagatcaacctcgacgagcttgagccccacattaacggtcccttcacccccgatctcgccactcctatctcccagttcaaggaggctgttaagaccaacaagtggcccgaggagcttaaggtcggcctgatcggctcttgcactaactcctcgtacgaggatatgtcccgtgctgcttccattgcccgtgacgctcttgaccacggtctcaagtctaagtctctgttcaccgtcacccccggttccgagcagattcgcgctactatcgagcgtgacggacagctcgagaccctcgaggagtacggcggtgtcatccttgccaacgcctgtggaccttgcattggtcagtgggaccgccaggacgtgaagaagggtgaggctaactccatcatctcctcctacaaccgtaacttcactggccgtaacgacgccaaccccgccacccacgcgttcgttgcctctcccgatctggtcgtcgctatgaccgttgccggtactctcaacttcaaccccatcaccgacaccctcaaggacaaggatggcaaggagttcaagctcaagcctcccaccggtgacggcctccccactcgcggctacgatgctggccgtgacacctaccaggctccccccgctgatcgctccgctgtgagcgttgctgtctccccctcctccgatcgtctccagatcctcgagggcttcaaggcctgggatggcaaggatgccacggacatccccattctgatcaagtgcaagggtaagaccaccactgaccacatctccatggctggcccttggttgaagtaccgtggccacttggacaacatctccaacaacatgttgatcggtgccaccaacgaggagaacggtgaggccaacaaggtcaagaactgcttcaccaaggagtacgatgccgtccccgccactgcccgtgactacaaggctcgtggcgtcaagtgggttgtcattggtgactggaactacggtgagggctcttcccgtgagcacgccgctctcgagccccgtcacctcggtggtctcgctatcatcacccgctccttcgctcgtatccacgagaccaacttgaagaagcagggtatgcttcctctgaccttcagcgaccccgccgactacgacaagatccgccccgaggacaaggtcgacctcctctgcactcagctcgaggttggcaagcccatgaccctccgtgtccaccccaaggacggtggtgccgccttcgacgtctccctcagccacactttcaacgagtcccagattgagtggttccacgatggctctgccctcaacaccatggcccgcaaggcttaaactgcctttcttctgtcatgactccccaataaaaccttcaagtgtttcggttataaccgaagcacctgtgtaaactacgttctcttgtgtgttgaacaattcagatacatgcttctgaaaaccacggtgtgacacggcgaccattaacttggttgtctattgcccatgtccctttcgcgagcaggatacgaggagttgcgctcttgggaaaaattatgaatgaacttgtgtttttgtaggcctgatttctcggccttgcgttgattcccgatatctgggtgggaccaatggatatactctttttgatttttacatcactgtttttgtatgttaagaatggcatgcatacacaatttctttttgttttcaaattgttcctctcgtaggtcgtagattcataccaatgtacgtatttcaaccacgtccggcatgagtagagagagaacgtccgacagagataccgttcacacctcgggacatatcaaaagctgagataagctaccgaggcacattttctgccccgcgtttgttggacttcagtataagatcgaattggacgccatcagatcatcttattccgtcatagggtccggcaagtttggcgctttaatatactaccacgttcacctatacatctcattacacaccatctacccgcatcgatcaggccaacagcattttgaatgataacccaaccaccagttgaccactgatttgcacttccggacccggatataaggacgaggttattgaggatctcttattttttatctctattcccaccctatcttgagaatgacgactcagctcgtccagctcccagaagtggagcgcctcagcgcctcggtcgtaaggattctaggtggaaatccggggaaggtgagtacatagatgccatgatgtcactataccatgacgaactaatcaatagcacgctctgcaatacagttcacgctacaaggtaagcatcatactccatccactcagaacatactctaaccacacatacaggcacaaacacatacttaattggccgcggccaccagcgaatcttaatagacacaggtgaaggcatgcccgcatgggcagcaaatcttcaatccgtgctttcgcaagaaaaagcaacagtacaccaagctctcctgacacattggcacggcgaccatgtcagcgggttgccagatctgctcaagctctgccctcaggctcagatcttcaagcaccagcctgattccgctcagacagatatccacgagggtcaggtgttctccgttgagggtgctactctgacagcattccatacccctggccataccgttgatcatatggtattcatgctcgaggaggaggatgctatgttcacgggtgatagtaagtgcggttcttttaacccaacccttcccttccaccgatagcacatgatatacaaggttcttttgagaaacatatctgactaaaatgaacagacgtcctaggccacggcacagccgtcttcgaagatctcaaaacctacctcaacagcctgcaccggatgcgcgaccgcgtatcctcaggccggggctaccccggacacggggcggtgatcgagaatgccggcgcgcggatcaccgagtacatcaagcatcgacagcagcgggaagatgaggtcctgcgcgtgttgcgatttggaaagcttgatgtcgcggctggcgagtcctcgccggtacacaagcaggcctggacgcctattgagttggtcaagcagatctaccgcgatgttccggagtctttgcatttacctgcttcgcatggtgtattacaggtgttgatgaagcttgaggatgaggggcgcacagtgcatgagtcggattcgggaaaatggagtcttgcgagtgaaaggtcggctctgtaagttatatagatctaaaagacttggaaaagatatccgacaccttaaaacatccatattgtgctttgatcatctgacttccttgactatggattgttgcacggtctggttgtccagatgcggagtcagaatgatcaaaacctgtctaggaaaagatctgacgacatccctctatcaaatccaagcagaatagaaaaatagaaagaaatagaaatattcttttttccttggttcttatatttttccctacttgttttctacacacccatgagagcgatattgaggcccaccggtcgttccagcaattccagggaagagtgacgttcgcattccggtcccccgctttgccttctcaccttttgccctttttttccctctcttcacactcgactctttttttttaatttggtattactgctagctgttatctacctatggagatagactgctagtctggtgctcattcggagtgaatattcacttgttccaaaggttggttcataatcgtcatgatctccagtttccccatctacgaaattgactctaatcgcatgtcctctcggaactataggagtccagcttgccttgcctactctcaaacccattattttaatccatataatctcatcctccattttcccccggcatccgatccatcatgccttccatcgagcccaagaatgaagctcgcctactcctagtctcgaaccgtctgccgatcaccatcaagcggtccgatgatggaaaatatgatttctcaatgtcttcaggaggcttggtcagtggtctgagtggcctttcaaaatcaaccaccttccagtggtacggctggcccggtctggaggttcccgaggccgagatccccgtcgtgaagcagcgcctcaaggaagaatacggcgctgtaccggtcttcattgacgatgacctggcagatcgacactacaatgggttctccagtcagttgctccttcctgcgaaacccttggaatgtacactaatactttgttctttcggatagactccatcctctggcctctgttccattaccaccctggcgagatcaccttcgatgaatccgcctgggaagcttacaaggaagcgaaccgtcttttcgcaaaggctatctgcaaggaagtacaggatggcgacctgatttgggttcacgactaccacctgatgctgcttccggagatgctccgcgaggaaattggcagtaccaagaagaacgtgaagatcggtttcttcttacatacaccgttccctagcagcgagatctaccggatccttcccgtgcggaatgaactgctcttgggtgtcctgcattgcgacctgattggcttccacacttacgattacacgcgccatttcctgagcagttgctctcgtctactgttagtataccccgtaccgcttggagtttatatctaaccagattaggggtcttgcaactacgcccaacggcattgagttccagggcaagattatcacatgcggagctttccccattggtattgaccctgagaagttcaaggaaggattgaagaaggagaaggtccagaagcgcattgccatgctagagcagaagttccagggtgtgaagctgatggtcggcgtcgaccgtcttgattacatcaagggcgtgccccagaagctgcacgcgctcgaagtgttcctcagcgaccacccagaatgggttgggaaggtcgtgcttgtacaagtcgccgttcccagtcgacaggatgtcgaggagtaccagaatttgagggccgtagtgaacgagctggtgggtcggattaatggaaagttcggtatgtatcgtcgtttggtgttccgagcaacgctaatcctcctccaaggtacggtcgagttccagcctattcacttcctgcacaagtccgtcaactttgacgaactcattgctctctacgccgtatcggatgcctgcattgtctcatctacccgtgacggtatgaatctggtggcctacgagtacatcgctacccaacagaagcgccacggtgttctggtgctttccgaatttgccggagcagctcagagtctgaatggcagcattatcgtgaacccctggaacacggaagaactggcaggcgcctaccaggaagcggtgaccatgagcgatgaacagcgggcgctcaattttgctaagctggacagatacgtgtccaagtacaccaggtacgtttccctgtcaccctgccaaccaggtcgtctcctgttttcgtatttcgtttccgactgaccattttctagtgcattctggggccaatccttcgtcaccgaactcacccggatatcagctcactctgccgataagttccaagccaagaaattggcggaagcagattcaaacggaggcgatgtgccacctacgacacaaaacgcgtaataatctttgatgtttctcttccgagacatgttttttccctgtttccaggtgctctgcagtcggaacgggtctttcaaatgaaacttagatggccttcacgaacatggatgaggcgaaatgtattttcttagaggcttcttgttggtttctgctttccttttttattttttaaaatttgattactgtatacaggttgggtttccttctaggccagacataactaggaaacgggtagattggctcatagttattgtccaactgtattgtaataggaggtagcggatgggacagagttgtgaagtccgcttagatgaattgacactctaaagacttgaacaataagcagttgagctgcaatgtatactttttaaatatgaggatattgctatcaagttgcccagttactcctaagtccatccaagtcgatgtcttatactagagtgcaaacagtgcaaacatgcttccccgagaaattctcgaaatccttaaactgcaaacaccgcaagctcgcatccatttgggcggtcattaccacaaaccatccacctgcttgaccacctccaattcctcgtcttctccaatcccgtttaactacaattggcgagcaaaccccctgctcccccaccaacaatggcaccaagccacctcctccgggcaacaatgcctctccgcgcctcaatcaccacacctctgtctctgacacgcccttcaatcctccaatcaaccacatacctcaccacgctccgcaacgcctcaacaaccaccccaacacccacacagccgaagaccaccggcacagaaacgcaagcgccttcccgcctgcgcaactacgcctccgccctgaaaaccggcaccgtagtctccgtcggccgcatggaccgcaccgtgcgcgtctgccaccgccacacatcctgggaccgacacatccgcaagttctacccgcaggaaacgcactacctagtctccgacccacgcaactccctccgcgaaggcgacataatcgagttctcatccggcgcacccaagagccgaaacgtgcaccacgtcgtcgagcgcatcatcacgcctttcggcgaggccattgccgaccgtcctgctgtgttgtcgaaggaggaacgggaggctgagcgtgagaagcgctgggcggctaagtatctgcgtcgtgagtcgaaacgacttggtcgtgaggtggatcttgtggaggaggcggctaaggccggtgttcctgtgccggagggggaggcgctttctactgcgcagttgattcatcggattcatgcggagaatgagcgtgttgggaaggttaagaggattgtgcaggagagagtcgcggaggatgagcagatgcaggagagtcaaagaggctaactaagcgctgaactgttgggttttactgaagtgtacgtttagctctttatggcagtattcggactgtcgggtttgtcatttctgtgttgcatatcggaggttatgtactgtattatataccgcttcaatctattttcattggcattgtgatgtgttgtattcctgtggtggatcttccaactaaaagtaggtctaaagtacgtatgagaaaaggaaggagacgaaccatcaatatcaaaatacaaaaacaccaacagtgtatacatcgtaaacatggagttttcctagacgacgtctagttcaatcccctaatcatttgtaaacagaaaagaaagtcactggtatcacggaagaataaccaactcctttacccagaaaaggcaaattgtgcccgtcaaatcctgaacccttcaacttagaagtatgaccctggcgagaaacgcagtgctcccagctcctcgctcagtgctaacttaaaatcgaaggtcatgccgcgaagacccggaccttgagatcaacactgccagttgccagaacacatcgaattgacatctttgtcgcgtcttctttcgccccgttagacgcagcctcggtaccgttcgcaccctcatttgcaccagcgtccttaaccaaaggcggcgcccaccgaagtgaactgatgaagtggccgtgggccacaatcgtgcgcacacacttgcattcttgcgtaagatcccagcaccgcaaagtcttgtcgtcagatactgagagaaggtatttcccaccgggatggaagaccaatgagcgaacccagttgtcgtggccaacaagggtcttgatgcagtttccgcgggtatcccatagacggatggtcttatcgcgagaaccagtagccacaaactcggcggacgatgatgctggcggtggtttctttagccccgcaagagctgcaaagtgagggtagcttgttggcggagcgaaggccacacactcgatatagtgctcatggcccaggaatgttgatttggtatcgccagatgaaatatcccacaggcgtgcaacacggtcatctccaccagagaagaggaaccggccatctggggacggtgtaacatctcgaatccagtctccatggccctgcatggatttgacacaatatccggttgtgacatcccatatgcgcagtgtgagatcgcgagaagccgagacaagcaggtttcctgacatgggagaccccgcagctccggatggaatgaaccgaactgctgaaacactgtggtcgtgccctggtagcgtccggatgttcttatactcgtcagccgggtcccacagttttatcgtcaggtctgacgagcatgatgcaagaagtgtgcctccgcgggggcctccatagtcgacgtccaacactgccctggtatgtcctttgattgtgcgttctagttcacccaactcccagtcccagatcttgattgtggtatcgtctgagccggaggccaatgaagagaatattggatggaaagcgagacacgatactggcgagcggtgcgattcgaggtcatggcgcgctggtgcgcgaggcagccaggagactgggtcttggtttttgcgattcagagaggtcggagttgcggtatccagctcagactggagtgaagcgcatcgtgcttccaaatccataatctataccggaatagcgggttaacaagaggaaggcttgtggtatgcttggtcttcgcacctttttctgtaaccggactacgctcgtccatttcttctccaagaggccttcatatttctttagtgtggtatcgtcgactctaatcgagtcgcctagttcttctcgtaaagcggcggagctgtggtgtaaattcacagaggtgaggtaggcgattattcctttgtgtctgtcgcaaaacaccatcagcgatcacccctaaatgaaccagatcgggtcacatacagctcctccgcctgccgcgacgtgagaagttgactcatggcgttatatgtactttctgttctcgcctatccaaatgcgcatgcaccaaattggtccacaaaactgcgatggaggggaaagtgggagcgatgtcggcgaagaaaggggagtttggacttccagaattgacgaattggcgaattgacgatttgatccagaagaaagaaagaaaagagaagataaatatgaagaagttgagatccaccgcggggggtttaaacaaaacaatcttcgccaaggcttttgtttactttccttcaacttcaactgtttattttctttaactccagtgtctttcgactatccccaccttggtcattatacctacacctttgacttgactgagattcatgttctagttgtcttattgattctttctttgataccctttgggcatcaacccacagtacgaccatctgaaccccgagacaccccgaccccccgcaacaccaactccaggacctttgatctcttctccggaacctcctctgctgccatgcgcacttctggtcggacactacagaacgtgctgactccttctccttcctagaacccgttcatagttctcgttcttcccccatcagaatggctgaagccacggaggacttctcctccttacccttgcccgaccggttcgctcacaaggtgcgctcattcctgcatgacaagtcggatcgataggatcgctgaaattctaacaccgatatgcagaactggaaagtccgaaaggagggatacgaggatgcaaaagggcaatttgaaaagactcctgatgaatcacacccggtcttcgtaccattcatacaagaccccagcctgtggaaaggggcagttgcagattccaacgtggccgcacagtctgaaggtcttgccgcatactgcgcctttttgaaattcggaggagcccaggcctgcacgaggtgcgtcaacccccggtcccagtcgcgacagccttcttggtccacccctgcatccactgacaaaagttcccatttataggtcccgctcatatacgattggcccaattgctgagaaaggtctcccatctacacgaccggccggtaaagctagcgcccaggaagctcttttattatgcgtcgaattggacaaggccgatccggtgatcgaggagctactacccatactatcacacaaagtaccgaaggtgatcgccgcctgtcttgccgccttgaccctcatttatcacaactacggctgcaagatcgtcgacccgaagcaaactttgaaggcgcttcccaaggtttttggccatgccgataaaaatgtccgcgcggaagcacaaaacctgaccgtggaactgtatcggtggctccgggaggccatcaagcctctgttctgggcggatttgaaacctgtgcaacagggagatttagagaaactattcgaagctgtgaagcaggatcccacaccgaagcaagaacgattcactcgagcacaacaggatgccatggctacggccagcgctgcacctgcaggcgaggagggtgacgaaccagctgccgacggatttgatgaggaggaagatggagtggtggtcgatgccttcgacctggcggaaccggttgatgtgttcaagaaagtacctggcgacttccatgatcaattggcctcgtcaaaatggaaggaccgcaaggaagcgttagacgctctctataacgttgtcaacgttccccgaatccaagatggaccttacgacgagatagtgaggggattggccaaatccatgaaggacgccaacgtcgctgtcgtcacggtagctgcgaactgtgtggacgtgttagccaagggccttcgcaacggttttaccaaataccgaggcgtcattatggcgcccatgtttgaacgtttgaaagaaaagaaggtgactgtcgcagatgctttgggccaggcgttggatgccgtcttcacaacgacaacccttacggactgcttggaagagatctttgagtatctcaagcataagaacccacaagtcaagcaggaaactgtcaagttcttgattcgttgcttgcgcacaacccggacggtaccagccaaagcagaacagaaagcaatcgctgatgctggcacaaagctattgaccgagtcagccccggcaatccgcgaaggagctgccgaaattctgggtaccctaatgaagattctgggtgaacgggccatgaacccgtatctcgacggacttgacgagattcgtaaaaccaagatcaaagagtactttggaaccgctgaagtcaaggccaaggagcggcccaagcctattgtggcacccccaaagcctgccgccccagctggcaggaaggtcgttggcaagaagccggcaacagggctgaaaaaactagcccctgtagccgctccacctcccccagaagaacccccggccaagcctgcagccagaggaatcccttcaaagctcggtgccccgaagccaggcggccttccaactcccggttcaggcctcaagttgcaacggaagcttgctggccccggagccactgcgtcaccgtcaagacgagttgctgcacctccagaagaggatgtagctcccccgccacccgctcccaaattcggtcttggtcgtggccttgcgggtcgccccattgccagaccgtcggcgcctgctgaacctgcgcctgcggctgccccagtcccttcacctgctgccaatgctatggcagccgccgagcgtgctgagctagaggcattgcgggcggagaaggagaacttcaaccgaaccgtggaggagatgaagtccgagcgttcaaagctcaactcaacgatcactgaacttcagaaccagaatgcacagttgattgaggaccacacccgcgatgtcttgagcatcaaggcgaaggagactcaacttgttcgcgcacggagtgatgcggaaactgcggagggaagtgttcagaaacagcagagagaaatcgaaagattgaagcgtgaactcgcacgagcacttcgcgcgtctgccataagcccacctaatgctgcctccgatgcaggaagcatgggcatgccagacacaaactccatgtatcaggaccacatcgccaacagcaatgctgcttcacggtctggccttcacatgggatcccgcttcgaaagctcgcgtcctcgaagctatgcttctgctactcccagcgaggagagagagaacaacgggatggagtcaccaggacccagcagtcgcaatggcggcctcggcagacgtaacttgagccctacatacggctactcggctgttggtagcccgacgcgctcatctgcccgaaactctaacacaaatatcaccgaagacgaccagcagcagcccagatcttctgaaccggcagagaactggaagcgagctgcggaagtcaccagccaactgaaggcgagaattgaacaaatgaaggtgtgtgattgtttatcgacgaccaacgtctgagcctgaactaacagggatacaggtacgccaagggctttcacgacctcaacgttaatgaccaaatgaccgcgatcacgtttatgtctcgtccttcttcacgctatacaccttttcgcttgcttttgcttcaacttgtgtctttagacagagtttctcagtgtcatcattcatacaaaataaatcggtggtgagcatctctggtcttctgggagcatagggctgggcttttggggttctttgtactttttcttctcttatgctttggccgtggacctctggatcttcctgtaatttcatcataccacccttgtcttttcttattctgctcatgactattggtttccggtatcgatggggttaaattgtttgttatcactatcttgctatgtatttctcctgcatggtgattgttttacatgtatgtgacctctatgtagactaaagtcgtcgcctgttgccttctatgtctgagcatgcccctcgataatgtgcctgtaaatgatgaagtggcaccagtggaagagtataaaaacacattacccattggactgcccctcttattgtctcactcctcttctctaccatctcttcccgctttgcttattcaaatcaaattcaaagtgggctgagaacggtacgtatacacctcccctacccaccttgaccattcggtaaatagagcaaagcctgaaggtacggataagctaatagttcttgtctgtaataggcgagccagacagccacgcaaaggccaagtaccaggccagccagcaggtccatgatgcgtatgatttcagtggaagtgagttctagatagtctcgtgcgtgtagaatgtggatatatttcttcatgcatacatatatttgtatgtgacatgtgctggatatgtttcctaggggagattacccctcaatctcactcgtatatatatgtactgcgcagcctgacaggtcttgtagtgttcttaactcttttataaacagctatatggcttcttcaagaccagattgtttgatcggattatgtagagatctttgaagacatgtgccaagacgggactatgttttagaaaatgccttgcttggtattcttggcaggtctcacagatcgcacacaatttgggaaggagagaaaaaatctcgattgagcgaaatgttgctgatcaagagatctaccacctctacgcatggactcttacaattaagaccatttactgtaaatacgaaacagacgacatgaatgcctagttctgatgggactacagaggccatcaatagattgaacaggtagaaaaatgcattcatgggtatctgcagaaaagtggtacatggggccattggaggttcgtgagagaaaattgtgtctttttttgttagaacaggatccaaaaagggccgaacggctcgtttgcacccatctaaagctaaaagaattggccgtcaatagatcgtcaaagccttcaacaccttgtcgtttcccataacaacatattatttttgagatccgagcgcttcgattagaaaacgatcccgtcaaacaggcaccaaaggaaaagctgtagttacacaagcttaaaccttgatggcggcagcgagagccttctccttcttctcgatgcgggcgttggccttggagcccatgataccaccaccccagtggcggcgggagtcctcgtacttgtcggtgtaaccctccttgatggcggagaggagcttggcgaactcggccttgtcctcagcgcgggtctcggtcagggcgagaacggcggaggtcttcttgtggacgactgtgccgagacgggccttacccttgacaatggcgtaggggacacccatcttgcggcagagagcgggcaggaagacaaccagctcaatggggtcaacatcgtgggcgatgaggacgagggaagccttcttgttctcaacgaggccgacgacgtggttgagaccgtacttgacgttgtagggcttcttggagacatcctccttcttcttgccctcggagacggcggtagcctcctggacgagacgctccttcttctcggccttagtctcaggacggtacttggagaggagcttgaaggtctgggcagcggtgttgcggtccagagtggcctggaactgagcgatggaaggaggaaccttcaggcgcatgttcagaatcttcttctggcgctgaagacggacatactcgggccacttgacgaagcgggagaggttgcgacggggctggatgtcctggccgataccgaagttgcgagggcgcttctcgataagggggttctgtggaagcaaggttagcgtcttcagagcccaatgcacttctaggaggaagaagaaaacgtaccttggcagccttcttgccattgccagccttgccctgggggtagggcagggcggcggccttctttccggacttagcagggggctatcattgaggaagaagatcagcgtgctgttcacatattgctgtatcttctttgaactctaaggagaacatgagccaagccgtgttacgggcattgactccatgcttccagccaaaatcatcacacgatgcgcgacacatctctttcgaggctgtgcgcgatcggcggaattgcttagatcagagatctgaagcagagcgaatgtcgcaagacatcgcgggaactagaagaagtctctgatgttatcaagagacatttggggtactcaccaccattttgtcgactgggattgcgctggttgacggttgacggatgagaaagggaaaagttcgtgtggatgcaacttatgaagtttctgtgggtcacgctagcgcactcatgtgaccagggctagggcaagccactagggcagctctgaacaggcacgtgattgaagtcacatgatatcaatcatctcgtgagatccggcagcagcgatggagcgtaacttcctaaattatctaattagcctatgaataacagaaatccaacagcaccccccctagctcttttgcatctcttcaaacccaaccaggatacatcgaaatgatatcgaaatacaaccttccatttgaatgacaggacgctaattatcgggggtgcggaaagatcgccgctactatccttaggctccagattggtcatggtggcatttctgggcccacaactggtcagactccctgacgatgtacatcgatctgtccacggctatttgatgtcgcgttgtcgagctttagaatctcatactctatcgcaatacagaaaactctccgagtgcgcacacgcagatatgaacgaacctgcaatcgagctatgcgatgaatgtatccggttggaatgagcttattcaagctgttgtctcccaaacatcactatgaacaccttaccatccgttataattgcatcaacttctgctcccttctcgacctttaccagaagcatcctgccaccaggcacaccaggtactgcaagagtctcaaaatggctcgaggatccctttttgaaaagcactgcctaagtaacagtgtatgaatcgacaacactttttcctttttatcaccaaggagctgccgtatttgtgcaaaaatggatccctcgcagggagttgaatattcgcattccatctattcatgcgtcactgactgaaattccagggatagcccgcaacaagttaacttcgtcgatttagcacaatgtggctgaatacaccgtcgaagatatcaatgctgctttactagctgcgttcatcactctattgtgggagagggggcgaacaaaacgtcaattcgatatggcggtcattaatttcacgagctcggcccaccacatttactctatgtggcatggccgcattcagaatcagtgtgcccgttatcaaaatctcgtgcgccagcccacgaacaacgtggctgttgccatagacatgttgccggcgtacaagtttgattgtaccagaatagtgagtgctctgacacatctgtccttagtgcgaacttgagccatccgtcagatactttcaatcactcgtatcttcaaccaacccagtccaagctcttagcttctgtttctacatcatttcgtgccttgaatcacatatacctccaatcacccaagtatatattgaagagaatatgagtaattgactttacaaaatttcacaatctacaaacatgtcactcaatatatcattcaagggaatcaatagccgaaaaatctaaacaccacacccgaatcctgcgaaagcaagtctagaatgcgtaaccataacgccttagatagaccaaataggacacagtgatcccaggtccatcaatatgcaggtcatcagaagagaaagcctccgtcctccatagatcacctccacgcccccaagccgggcaaagccccacgacccaaactagtactagcagcctgaacagccttcttcttacccaaagatccctcctgagcacgcacagcagcaatgatcttctcaatattcgtctcaacaaccacaccaccgacaatcatctcaccgagcacagcatgcagagtctcatagccaaagataagatccagctcgcagacattctcgaacatgcgatccagcgcctcgacaaatacctgaatcagatcgatcagagcgagtggggactcggtcgacgtagagatcatgatgaacgacagcgttgcgtacgtccggtatgtgatctgggtgggggcatcggagggtccggaggcggaggagctggcgccttgcgagaggagaggtgggagtgggaggaagttgcaagcgcttgctggacgctgcgcgactagacggtatatttgcgcgatcagggattgctgggtttgtgtgtcctgttgctggttagttggggtcgtcctgcgcggaaaggtgcgagcacggcggggttcaactcaccagctgtgtgtagaattttgtcagtcggggctggccattattattgaagacgaggactgcgttgatcatcttgactggtatgcttggaacaagctaaagagaaggtcaggcttatctggatgcgatagctgatgatgcggtcttggctcgacttgccccgtgcgccgatctggagaaatcgatatcaactctactttttctaaggctttatatcgactcttcttcggatattcaatgtcatgatgaactcaataccagcatgtaggaactcttcatccaggatatcattatacacaacaatccgagccctatcctcagcctcgaattccagttcaaagcgcgaactcaaagacctcaccccgtccgacctctgctactactgggatacaagaccccccaaagacgagcaactagccttcgccgacaaggtcttcactccatcgcgccactcaccggtcaaactctggtccgcggccaaattccgcacaacaccatttgcatcagtcgagcccgaagtcgcattcctgggccgctcaaatgtcggcaagagctcactactgaacgccataatggggaaggagatatgttggacatcatcgaaacccggccgaacacgggagatgaatgcgttcgggattggaggtacaaagggcggcgagtcgaaggttgtgctgcttgacatgccgggatacggaaaggccagtcggtccgagtggggagaggagattatgaagtatctccagggacggaaacagtgagttatgacccgtcctatatggaatatgaaaaatatgagacgaacctatctatggtgtacaattactgacgaagatattagactccgtcgcgcattccttcttatcgacagcacgcacggcatcaagcaaacagatgccgagatcctcagactattccgacaccacgcaatcccgcaccagatcattttatccaaggtggacaagttcctcgttaggcaattcaagcagataaaatctggtgtcacgcccgccaatatcgagcgactacagctcttgctccagggtatcaaacccattgtgcagccggatccgggggttgcggaggggcctgggtctttgggggagattttgacttgtagtgccgaggcgcggattggtcctggcagggcgctggggattgatgctgttcgttggtcgattttgtctgctgctgggattgatgggagcttgcaggatagtcggcttgctgtaccgtctgctgcggagacgccggtcactttgtcgtgaaatggcttgtcgtggtgtccatattcgaaactatcctcgagttttcggacttgactctggtgcggctagtcaggtcgactagcccttggctgagcgcatgtatatctgtgggccagagatgagactgtacactcttcatcctttctctgaggcaaggactgagtatggcagccaatccttgaatcggacctggcgagccgctatcaggtaattagcagggatcggtctacgacgacggcatatctagaccgccaagcaacaatatggtgcaagttcgaggcatttgcatgcttcgctacgtatatagggccagctgctgtaatactatatcaaatgcaattacaataaaatttaagcacaaacccaactcaggacagaattttcgacataggtaatcaatctattatgggcagcccaatacaggcaaagcatgacgaaaaatatgtaaaagaagcaccgagctggcaggcaacagaatgggaagtcacataagcatcaggcaaagacaaagaaaacgtatcgatgacggtatgcatggggataggcaaatatttcggaatacagaatgatagaaagctccacataagagatgatcgaaaaaatatgggtaaaaaaacgccttgccccttatcgtaatgctgcaagaccaaagaatgccgaccgcgctatgcaaaggatatttgttccgatggaagacgagagctgtaaggatgggtatcgtgaatgggggaatagagtgaggagagaacaaaagacagaggaaaggaagtaagtagtgtaaggatggttgtcggacgttgagatattgattgatgccgaatagaaacgcggcccgggcatttcaatcagacaagtcgtcatcatcttcaattccgccggtgacctcctgcccacgtcggttgacgacaatgcgtttcgcaagcttgctttctgggactccatcccgtgcagcaccgaagtcaagaacctgtgagaaaacaatattagtataagggatcggaaagcctcgtcagatgaacacttacttcgatataagtcatgttgtcacgttgcaccgcagcaacacatctccgatcattgaacttgacttgccacacaccactgaggtccgtgaggaggtctcgaacacactcgccgtttcgcacatcccacatcttcagcgtccggtcagacccggagatgaccttctgcccatcatgctggaagcaggtgatggcaccagtgtgtgcactcaaggtgttcttgcagtgaccatggacggagtcccatatccggagggtggaatcagcggcagccgagactaagaaatcttgttctaaagcgagcagaccaacgagagaggtatgaccttcgaggttatacaggggagccccatcgtctagcgaccacaccttcaccatgtggtccattgctccactaatgcaacgattgcgcttatggtcaaggaccacactgtacactttcatcgtgtgaccctggagagtgtgtaaagtctgtccggtggagatcttccagaccttcaccgtgcaatcgtagctaccactcacaagggtatcaccgtgtgctgcgattgcacgaaccgagtgttgatggccggagagcacccgcatgaaatatggacagttactgtcatctgcgataggagcattctgatagtagactggatcaccgggcttgggaagcttccacacccgaaggttcgagtcacgagacccggtaatgatcaatggttctttaggcatgacctcaggctgaccatcggcatccctacctacctcagtaggcaggacaatttgcaggcatcggacggtggaggtgtggccttggaagatctgagtacacctggcccgctcgatgtcccagactcgtactgagcgatcggtggaaccagaaaccagcgtgttgccatggtattcaagggcccacactccaccttcgtggccttccaatgttgcctgcaacgcacccgttttagtgtcgtacacgttgatgttcgtgtcatcacttcccgtaagaaccttgtcagcgtcgaattgcaggcaagtaacaacatggcggtcatgtgcgcggaaagcaatatgttgcggtttgacatccggctgcatccaccccctgtggatggcaacatggcgacggtagagcaccttgaataggaacagcccacgaagggatggtagacccacttcagcataggggattgccgcagctgcagcgttggcagcagcatatgggccctctgatgcggcaatacctctcttccagtctggatcggtgatttctcctccactggatgaggccttccgcttggcaagcttccggcttgaagcgcgcgtgttggctttccgcttgcctcgccggttgattggcagagaccccagagggcttctgctgctgggacccgccatcgaagggacgggggacacctccatatcagccctagacaggggcacaatgctgagatcttcctcgggatcatgaggaccgctgggcaactgccatccccatccctgccttatagcccgttctagttctccatccgagagatggtatccatcctggtcaaggagggttttccagctcttttcatcagaattagtgatgtgtctccacttcttagatacctgcgcagcacggcacatagtctgaacgtcaaggtatttgacgatgttgagactgagttcaagcggcagcagagtcaggaagtcgcacttcaaggttggattaaccacatccgccacaaaatgcagagttggtttagggcatctccgaagaaattgatacatgagatatgttttgacctcatcaggcactgaatcgaagaactccagcactttgggcatatcaagaagcgaggaaggcgatcgtgagttggcgagtgaatgaccacttacccgagtctcattcgcatcttgaagccgcaatgccttggaaaagcgcgagacattatggtcgaggctggaatccgtatcaacgtcaagtccttctgactcgaaggaggattcgccatgaagggcattcatagcagcaaccggtgagagactcgggctcgggaggcacatatcttgcgccatggcattgtctattgccgatagttgagacatgagctcgggtctttcttccgatgcagattcctgggttccatatgttgtatcatgaccaaatgaagccgattcatgtgcagttgaacaactctcatccggttcagtggcctgagactcttgggttccagggtctgaacgaatcccagacagtccattttgcaagtaggcattttgattcactgcctgtaagcctttagctccgatttcagaagacagaggtgacggcaaaggaggttccctgcgcggaaacaccgagctatggattctcggtcttggggccgcattttcaccagctccccccaagttgctttcggtgtctggggtggcaaggccagcggcatgagctgatccgccactttggcgagtgcggcgtgtgatgggctccgaaggaacacgtgatgggcgagttcgcggaagaaccgagggtcgaggatcgaaatgggagatgggggagacggcacgacggcgagtgttcgatgggtgagtagaaggttgactcgctattctcggagcagtcagccgccgagtggggttctcgccctcagagatgaacgagttcacagagcggatctggccgtttgaagatatcaacgcctcgcttttctctttgtactagatagtgttataatgtaagcattggaaccaaagatcccgcgagggtgggataaaatcgaacctccgtggcagcatttgtggtatcctcgggctcattgaagatgatcgacttgtcacctatcttgaacttgagattccttagggccgatggggtcggagatgcggcgagagggtattgtcgggcatccagatccttgacggctcgcggggggttgattgtcaagggcgggaacgaggtagtcgtggttgtagtggtcgtcaccactgtagttctggtagtcggggcgaagctgaactgtccgatagccgcatttgaggggccttggcccagctcctttctttcgtccatttcgcgttttcgaggacgagtgaatcgagatccggggctgtgggtcgcatgagaaggcgcagacacggacgcgttgtgatcggtcaaggccgagtcgatttcagatatgtgaagggaagtgggagcatttgaggtcattgtaaagcaagctcatgtgtaagggacaaaggaagtttgatttccctgatcttttttttagcaaaacaccccctcggcgtacaccagcaaaaccatggatgcaaagggcattcagcacatgtccgaacggaggataagcaagttgtgggaaacaaaaacacaagggaagcaaggaagcaatgggaaggggagaaagaaacagtggcggctgacaaggagttggggcggagaacaacatttattccggttcccgtaggtggacgatgtcatggcccaacgtgctactttttctttggacttggatttgaggatacttttgctattttgtcgaaatttacgtttggtttatattagttatcttaccttgattattctctatgcaaatctaaaatgatccgagtgtgaaagggcaaaaggctctggtcctgctcttagaccgaaatcattaccagatagaggtgggaccgaggatacaacactcagataagcagatattcacttccaattttgtctgaaccatttgcggcgtacgtgcaatagatgatatagtcgatatttgcccctaaatgctacatatcataatctattcacccatatcaacttcgatcaagtttttgatttgccatcgccacatatcacgtgaagtgggggcgtgccccgggtggcttcttggcacgtttccagtatctcattgttatgttgaagaaattatcgacttgggcgcaagagacagggggactaatcatctggtccgttgccccttactacatgtttactctatgcaggtcacatcatttccgcccctgatggaatacccaccgatgtctataatgtctcggcctccccacatctatctagggctttgcctttacgtacagatcttcagccctgtcccctatgatatccctggtcgatgatatttcgcaatattgtacttgccttgacaggtgagagattcatggagggacacagctttcaacttgaccattgtatcaccccttgttcgttgactagatagaaaacaagaagatagtcccaatatatatttcggagcacactaacgtttataggttgctgatgctaaaaaccacacaattgaaaaggataggtacacagttggggccctaacgcaatagaaacaggcattatatagccatgcccacatacatacctaggtacatatgtagtgacatatgtagtcacatcaggttctaaggttggcggttgcaaggttagttccaatgtctatgaatagacctgctgattccaggatgtttcaggatatacagtagtcctttgttgagatcgagcgactgaggcaaaagaaattttattcttagaacttagggttctaaacttttctttgtacctctttgtctccgttccgcatagagctatactgtcatcgtcttctcccattataaggctcaattcctcgttttcagtctgtcatagtcatacagccagaatcatgcctcgcgctaagaaaactgtagctttagaggcagtctccgagtctgggacatcccagcccaaaatccaagtggataaaatccatcggtttcccgtgatcgtgagtagcccttcggaccaactatgttgaatacatagcggccgagatgaacacaaccaactcttatggtacaacaggggcaaagcttggagttaatgaagataacactacacatgaccgtaagtcgaagttccgcacgaggtgcgtgcttttgcggctgcgatctaatgtgcgcctatagatcgcgtcgcttttatttatgcggttagtcgtgacctgaataatgtattttccccattcttacataggatgcagtggactattgcctatagacgtctttggcgagcgggttctgcgagcaaaccgtttccacgagcgctataactattcccattttgtaaatgggaagcacaagggcaactttgcacgtaaccgatcggaatatgttcctatacgcgtgattgaaagacacatgagcaatgaagccgatcaccttctcgacattctagtgagtgtctcgatggatgtatgattattgagcagagctaatactcctctctaggaaaatggcatatttgatgctctactaagaggcgtcctacatgccgtccagtttactatcatcgcagataaaggatcaccaaacaagattctggaatcttataccttcaccttcggaacttcaggtgaacgcggccccgcagatcgtctactcagcgaccccaggattgattttgtcagccctcttgaagatcgagcggacatgcgcaatatgattttcgaagggaaggccctgatccgacggttggtgaaaatgtgtgctgaaagcccggcattgcctagtatgtggactctattgttgcccgttcctggtgttattactcacgagttcaatagacgagcgcagcttgggaatacatgtattctacatatcggaatgtcccggatcctatgatgtgcctgggtttgctgcttcccaagatgacaccgttgaatatccgcgaacttcatactgggagaggacgaggcgctttattggaagcgttgacagcggctttcacacgtacgttttgtttcttcttttgtattgacatttgctttgctttaatcgggccccaggactaacatatagaagagttggtttgagagtaaattctctactttccacctcacccggtggcgaggctcattttccttcggcagaagaaacgaatgatcatgcagtccttcgttctgatgaggtcgggattcccacgcttgctcaaacgccgctggacgtagttggggagatttatctctccacggatgaaagcactgccagtgacaccgatggtaaatacgttcatatctgcttcacaatgttgacatgttatataatgcctaaaactttcattcgacacagacgaaatgatctctgtagcagagttcaaggctcttcattacgccaacgctgcggtcgcagcgggagttcggaggcacgatagcagaaagtcacggcgatatgtcagtttgcctttactaccgcgcatatctaaaccattgaacgagtgctgattttctgtagacagagaagagagtggacgacagaatcttcttcaatcaagaagacctggaatcccaccagtcccgggtgcaggaaatggctcagtcagtggctgattccctcgctgttaatttggacgattcagattcagaaaccgattcgcttgaaaaattggatcgcattgaacgctcgggtaaatctaccgtacctgtcaattggtcacaggatgatgattatgcaacatttccggttagccgcgatggcattcaactcgctctggctcgtcaacagactcgagaaaacttccccacgcttacatacatacggcgtttacaggaggctggttcgaaacccattgtcacagcaaggacggtacactatgtcgagaattgccacggcgccgttaagaagtcagacggggagaacaaagataacgggagtctgcctgggcctagtggcagaatgaccaagtacgggcataaaaactggcgtccatatcggtgcgagtgcaacacctggtacttcaagcccagcaagtctgtaagtgacgcaaccgagccatcgaataagtcaccatctaaccacccttggaagatacaatgtgccaattgcaaggagtaccagcacaccctgtgctatggctattattctgcaaaggacacgcgaattccagatatacattactgctacacctgtctgatcggatacgactttgatagtggtctgatgaacgaactaattaagcttatccgaatgcgcagaacactcgactatgtcctggcagcggaagggattccaagtttgaattggcaactagcgaaacgacttagtaagaacgactgccatccatcagaccctggaaacatccatctaacatcatccagactgcaccgacgacgaggctcgtgcagcagtctatagtctccggaaacttggcatcctgaaaccagcccgttggagggtaaaacacgagcacaaggtggggggctccaaattctggctcaatatgacaaccccatcctgcaacaccatctacagcgaagtcgtagactcgatgttgctcatcgggaaatatgtaagtggctccgtacaactgcgtaaggataaattctgactacccagaagtacgacataccgcctcctctcccccagccgatgattcgcacacattggtcccggtctgggataccgatcttgcataattttacgagtgagtctgatgagtggtataataccatggaccctcgctggcagcctgcactttggaagcgggtgcgttctgacccttctgccaatgggtatttcttcgaggggcagacctcaaacagcgtgtcgaagcgattgctggaatcagttgaggaaggatttgaagatggttctactcgggaagccaagaagatgaaggttaaatagaggaatggcagtagtttatggagtacggagtacagtatactctatactcgcatatactcgtgcccaaaattatggatatccacttcttccagaacagtgggtctttccgaatgcagcacagtccaggagactgaatcttctgatgcacatcatatattagactaagtagatatgcagcgagcttgaccgtttaaataaagaaggtttgcgatggaagcttttctatagttggcctcccatataaatcaccgtgatctatctcgtactactctataatattctacctggatacgctgatcatcttttgtgcgcttctgtccccaaatgaacaaatgatgtacaacaactccgtacagcccaacctttggaaagtgggacatgaaatgtggaggatttccatgatcgacgcagaagacaatagatcgacaatagagcgtctttcccaaccctggaacgagacttggctattggagtggactattggcgaccatcaggggttatccgcaccatttcacctagccgcctgccaaaccactagcctggatccaatagcgtatttcgctggaccttggggtaaaatacgtacaaagtaattgttctttttttctctttctttttgctttgttcccaacggttattcgaatgctttttgctgttcatttcgatctacaaatcctgcgccatcggagcagaccgaaaacccgccaattacgtacatgttgatcgtcacttcaatcgatctcggatctcgatcggagtgaaattgcgcccccggagtgtcatgtcactgcttgttcccgcctcgtgggtccaagacgcggcacatgggctaaagttaccaaggtagtttagagtgtcttacttgttttttgacagattccacgtaccgtgttcgacacggactcgtacaattatggcttgatttatccacagccatagagtccacgggtgtcaaggccgggcgcaaacgatcttcagtttcatgtctgcccacatgctaaaggttaagtttatgtggaggaacgagcgcacatgcgagacgatcattaccagttcctggagggataccatggaaacacatgtcactgcctcttcactatatttgtaggggtcatggagggtacggagtacacgggctgatatttgtgagcacagtggggacttcgtcgataatactggagcctttggaacaagatctcgttcgctccggtgcactgggtcggtaaatcgattgtcgatctggcctttcagatgcgacgggctccagctcggggagcagactgcaatcaatggtggatcctccattgtctctctagccttggactccacattctggcgatagcgccatcacaattaggaaaaagcatccaagggtgtggagaggagtccctagaatgagtggagcgaagtaaataattcgaaatagtgacagcaaggtgaggaattcggaggcgtcaatagtgtccacggagaaaaacggagaccacgttcttcaggttcgcgaagactatatttttaggttgcagattccgcagtaagggggggggggggtttaatctcctagaacaagtacgaaagtacggagtacatcataaatagtgtcatgcaaatgcaggtttctatagcatgatatgtcttatatactataccgatggtaaacccctgaagaggattcatcaccttggatatcacattctattatgttgtattccgtactccgtactccgtaaggtaaccttggaactcccgtgcaactatttcaaatatctgtcgatcagatgccgtgctccactccaatttaaattgaaataaatgaaacgctgcttctcagcctatgagcagtccgttcaagacatcggtggagattcccccttaagacccgtgtgaacccgtggtcaggaattccttcggattttgaacatacaaaaaaacattccaaccccaacttgtcacgcattttgctcggttttatcttgccttccccaatcccatacccttaaacaacagttctattttcaggtacattgaggcccaatctcccttaaacttgcagacttgaactaattcggtggagtagatcgagttgaaacgaaagcgagagaggatacttaaaccaccccgctcacaccacaaattgtacagagcctatgggcccatcgcatcatacgatttcatgagcaattgaccctgtccctgcctctcccaccatgggacaccgagaactcacaccggtccatgtgccgcttcgaacatcaagccggaaaccagtacaacatgacccaatgagcacacaggaacaatcacgggcagaccggcgaacctcgaaagcccagagattttttggaaccgatatatcactccctacagaacatggcgggtggcaggagcctccaaatgtacgccgaccgagctttggcaagacaaataatgctccgaaacagagctccggtttcgtcccgttcccgcgctcttcagagaataccttgatccccgatcaaaaccttcgtgtacgggcttcgtcgcctctgctaggccatgactaccgatcacaggaggctgcgccgccggtccccaagccgtcgaaaaaggtccaccattccggttcttcctccacccttttctcctatttcagctcgaaagaatcgtccaaatcacccaagagtcaactccagcctagagtacgccacggactcggcagcgagccacaagtgacatatacacaaacccaggatccacccaaggaacccaagcggaagatgcgtcctccaaaaattgacctttccgtcttgttcccgaagccacggaatcccgcaccacaaacacttctctccccacaccgaatggtcaactctccttctcccgtctctacagttgccccggattattcttccaacaagattgaaaggatgaccggaggcacaagaaactctaggagacatgccgacccacctcctcgccgatcttcggtcaccaaaaataatccacccaagcatggcgttgataattcggatttgccttcaattgcagagagcaagaatagcgaatggccggagcaatcacttgagcgaacagtgggaacgagtgagattgatttagccctggatagatacgcagggcggcgatcacttttcagtcgctcaagcacgtatacgacaagccgagagcatttgcaagaacagcctcacccgcaggaatctcggaagagctcaagacgtggtcacagcccctcccgacctaaggagacgtacttgagtcctcctgcatgtccagacccaaagcgcggccgcggcttgagcacttcccaggagtcttggaagaccaccgagtcaaaaccaaagagcgagaagagctcggtgaccaagaagagcagcaaaagtaccttgaaaaacaaggatctgcgaaacaccagtatgctttgcctgtcctcctcttcagaggacgagggtgacgaggaccacactccaaccgagccaaagcgcaatgcgagcaagtctagaagagacagtgtggctacttatgacgaatacgagccccaggtctacacggcttccactgcccacgcgaccaccgccacggcggcaagacgcgttgaccgggcactctcgactagtacccgaggttcccgtcaaaccgaaaagagccagccagtgccagtgccagtacctcgcccgcggaaggcttctcaacattccaatggcaagtcttctcagagaagtggacgaaccacgcaaacaccccgttcgagcggagttcccactatcccggatgagatcctggcgcagttcccgcagcagcctctccgctcccccgcagagttgaaagagttgaaccgaaggagtcgcgtgatcgcggtgacccgccaagagcaagatctcctcgaggcgatgcgtattcggaagggcaaagtcacacccagtttgttcaatgctcctggggcggacagacgatcactagcttctggcccatcccgcgattcgttctgcggatccgacacctcattcctgcgtctcagcaatgttttcccgccattcgacgtccgatcagaaaagggtgctacccaatacaaagatacgccctcccaaagctctggttcggatggtgaaccgaaaccccgcactgcagtctcctcttctagtgtcagtggggactattctgagagcttgccctcccccgccaccagcggtgcttcaccgttgacacccactttgccaattcatcgtttctcgcctctcccttctccgaagccgccaccaaggggacccccacctgccattcccgaagatcagaagcagcacacccgccgtcgcacggatagcagcgaggctatcctgctggatgatgccggtgagataaaacgcaacaatggtattcctctctggtctttcgactttgattggaaccaggaaagcgccaatatcgctactgtgcactgatcgcctggcctttgatacccaacactctcacttcatcccttacatttcttattttactcttctctcactttgtattcctacttgattcgatcctccacagtctttctcacatttccttgccttgattgcatcttgcagcactttgctgcaagctcttatctacccaaccacatggaccccaagtccctttcctacatggccgaccatcttgcttttccttctcactattttttcattactttttgaattagcgttcacatgcgggcttctatacctgctttcatgtattacttgggtggtttccgtgtctttctcacgatttcattatttccggctcacgactgttgtcattaatattctcaatgaccatcaatacatcaaacttgttcaatgattttgcccgattctccacatagttcccccacaacggtaggcaagcctagccttgagtcgtatgttgcattgcacagtgacccctagggactttgggtcctattggctttcaggatcatatgtctcccataggaataatttccgacactgtagagtacttgaattgtgtaattgacctcttaattgtctgtagcaaattgggcatttgtgtaaaacaaaactggggaatattcggccgcttatatgggccttatacttggccatataaaatctgaacatatagtgtcccttttttaactaaccctttggacgtctatacataatttaggtatctttcaagatgggcataaaagtctagaatgatcaacctcaaccatagtaatcgacaatatgaatgacgacatgcgaggaataagaatggggctggtggagatgccctggacagctcgacgtcatcaactctcacggttaaggggttggccagaattgagtaaacgtaaatattgtaaatacgatatgggattcccaccgacgaggtacataaacgataatatttgtactccgtatatgcacttacctatgtacctaggtatcgcagagacaactccagcgcttgaacctcctctctgtgatccactctctgaccgccgaccttccaaggttctcgtctataaccccggattatcgctttctgaacactctatcctttcctttccgttatcaagaacttttttttctcaagttcttcgaaataccctcattcatacaaaggagtagcgcgacgctcgtcctctccttctcccagccacccgtgtcgcctccgatcgcctcgggaaaccctatcgggacctaaaagggaagatctccagaataacccacccctggttcgcgaatcgggatttacagttcactctactccgtacatcgcgcacacttctcttgtcgctccctcaactgagtccatttaccacattcaccggacgggggattgcactgtgtgccccttttgcggaaacgttagccactgtttagagggaacacgcgacctacttcgttatgggagatcgcgcccaacgccagccgtctggcctgcgagctgcggccaatatcgcaccatggattctggtatgagcttgttgggcattatacggcgtttgcggccttggggactgttcgctgacttgccttggtttctttctagttgactgcggagtcgactgcgtttgtgttggtaagtcatcctggacgacgtggaaatacttgtgagactgaagctaatctgtctttctgcactatctcagctcgctcattattctcgagtcatgccccccgccggtggtaaacgctacctgacttccacagcggtctttctggttgaagtggtcaagctggccatctccctcacaatggcactatacgacgtctcaaaaactgcaccaccctcgatgcccgccacctccctctttttctccctcacaagcgccgtgttctcgggcgacagctggaaactcgctatccctgccgggctcgacgtcttgtccaactccctcctgttcattgcgctctcgaacttacgagctgcatcgttccaggttacattccagctgaagttccttactactgcggtctttggtctgatgctcctgaagcggagcatccctccccgtaagtggggcctgcttttgcttctcattgtgggcgtggcattggtgcaagttcccgacgctagccccgagcagatgctacatgatgaacatgctagccatcatttcccccgctccttggaggagtggaaggctgttaagcaaggtgctggtgctggcagcagcctgcaaaagcggtctgcaacatacgaaggcatcgaagaggacatcctgacggctgacccacacttgaaccccgcaattggtctccttgcaaccatcggagcgtccttggcttctggacttgctggtatttatttcgagaaggtcttaaaggacagctccaaccatatttcgttgtgggtccgcaacgtgcaattagccgtctactccgttttcccggctcttttcattggaattgtcttccgggatggtgaaagaattgctgaagatggcttcttccagggctacaattgggcggtgtggtctaccatcatcattcaagccttgggtggtatcgtttctgcattctacgtcagccacgcgcagaaggatgcaaggagtttggccacaactgccaacatacttttgagcattgttggaagcatctggctgtttgactttgaggtcacttcaagcgtacgtcccttgccttgaaaacacttcctaacctctgctctagattgctgttctccacacgaacattatgaacaagactaactggcatattacagtttttcctgggctcggctgcagtcctgatagcaacccactactatggaaaccccaccttcaaccctgcaatgggtgcctcgcgtccacctccaatccgcatcgacgcctacgaaaaggaccccgcaggtcccgagggttcccccgtggcgcctcccaacgacttttctatcaaacttccaacttcacctttcctctctgacggcatgtcgtcctcccgtcccacctcaccagcaccaggccataccagagtaagctctagccggaatgcgagcgcgagctatttcgatgagaaatgattgccgcaactcgctatgcacattgatattggcctacttgatgagatgctttacgggaaatgatattggatacctgacagatgcgggtggaagtgcggtcttcaagagaaccgtccaccgcgagcctttgatattgctcctactttggagttagctactcttcgctgccagattttgcatgtctgtcaagatacctgccaggtttggctcatgtatgcatatatacgaagcaatgaaacactttgatataccccagaacacttgacaatccctattcttgctgattcttaaaagacatcgctatagtatatacaaaaactacaaaggtatgggcagtccacgtgccgtcacgttatcggggtcctggaccttgggaccacctgggcagccactttggaaattcatcactccaaaccccagaatccgaatcatcgagaacgcatttcaaaatgaggagacatcatcagaacccaaattttaaaccatttcaagtgcccaacaagaggcgcaccaatgcctcctctccctccaagagtagtagaactggtatcatcgaccagagacttatccaaggctcccagcagccacaatacaacagctcatctccccgaaagcccttcaatggcttggcatcatcagcccatgatgaggatcctcaattggatgattttggtgagtctgccggctcaacatcatggagggtgctgatgaaagttagacctcgaactactagcttcagaggatagagacgaggcaattcgagattcagggtttagagtgcctacgtctacgccacttcaaccgtctcgtcagtctgatctacatccaccacaattctctcgtttctttcagcgtgagttacttgtataggatgttggtgtttgccttattacttcggtattgacaagtaacagccagctcgagcattggttcatcggaccctgtattggggcctctttcaagcccgctggctttgttccgtcagaagaagaatggcacacagacgggacagcgcagcctcgagacgaaccgcccataccatgacgagactagtcagtcctcacctcagggaccggttactcaagcgagtcaggaggctttgattggaaatagacctcggaacccttttagcaatatcccaccctctgtgcggggaatcgtcctcgtatcagtaaatgacattccggagaactaccgctcgatgttcccctttccactctttaatgcaattcaatcaaaatccttccactccgtctacaacagcaatgacaacatcgtcctgtctgcaccaactggtagcggcaagacagtggtgatggaattggccatctgcagactcgtgaacactcttaaagacgaacgcttcaaagtagtctaccaggcaccgaccaagtccctctgcagtgagcgcttccgagactggaactccaagttctccagcctgaatctcaagtgcgcagaacttaccggagacacggaccacatgcagctgcgcaatgtccaggctagccagattatcatcacgacgcctgagaagtgggatagcatgactcggaaatggaaagatcatatgaagttgatgcagctcgtgaagctctttctcattgacgaggtgcatatcctgaaggagactcgtggggcgacgcttgaggctgtggtttcacgtatgaaaaacatcgggtcgaatgtgcgatttgtggcgctgagtgctactatccccaactccgaggatatcgctacatggcttgggaaggatgcgacaaaccagcatgttcccgcgcaccgggagcatttcggcgaggagtttcgtcctgtcatgttgaagaaggttgtctatgggtatgcgtctagtttgaatgactttgcatttgacaaagtctgcggttcaaagtatgtgatttttttctatttctgcccatcgtttcatgtcaattggctggcttggcatactaatcggtgcttgggaaggctacccgaagtgattggcatgcactcatgcaagaagcccatcctgatattctgttgcacacggaattcatcgctcgcgacggcgaaagaattggcgcggcttttcacattgacaaatccacccgccaggctttggaaggaacctaagaagcgcctggaagctcacaacgaggatctcaagagtatgtatctgagctccttcctagactgacactgctaattcaagatagcaacacttgttgctggcgtagcatttcaccatgctggcttgggtcccgctgatcgccacactgttgagacgggcttcagagaagggaatataagcgtcatatgctgcacgtctacacttgcagttggaatcaacctgccttgccacctagtcatcatcaaaaacactgtcagttggcaagatggaggctgcaaggagtactcggatttggagatgatgcagatgctcggccgtgcgggccgacctcaattcgatgatagcgccactgctgttatcctgaccagaaaggaacgcgtcgcccactatgagagattggttcagggctctgagagtctggagagctgtttgcatttgaatctgattgatcatctcaacgctgagattggcctgggcaatatctcggacatcgaatcggccgtcaaatggcttgctggtacattcttgtttgtgagacttcgtcgaaacccaacgcactacaaactcaaagaaggtgcaaaccaagaagacgaagatgaattacttcgccagatttgtgagaaggatatcgatcttcttcgaaaatgcgatctggttgaagctgagagcctttcttcgacccagtttggcgacgctatggctcggtactacatccgctttgagactatgaaagtgctactgtctctgaagccgaaaccaacgttgtcggaaactgtgggcatattctttccacctaaaatgaagaacttcaactgacattacggttccagcttaacgtgatcgcacaagccgaagaatttcgtgagatccgcctcaaagccggcgagaaattactctaccgagagatcaaccgtgactcaggcattcgtttccccatcaaagtcgatctagccctccaagcccacaagatctcactactcctccaatccgagctaggtgcaatcgagtatcccgatagcgaacaattccaaaaacacaaattcaccttccagcaagataaaagtctagtcttcgcgcacgtaaaccgactaatccgctgtttgatcgactgtcaaatcgcccgcggcgactcaattgcgatccgcaatgcccttgaactcgcccggagcttcggggcaaaggtctgggatcactcgcctctccaaatgaagcagatcgagcaagtgggcgtggttgcagttcggaagttggctgctgctggtattaccagtattgaaggcctggaatccgccgagcctcatcagattgagatggttcttagcaagaatccgcctttcgggtcgaagttgctctcgagattgaaggagttcccaaaattgaggatctctgtgaaaatgcttgccaaggttcgcaattgttatgtcattatggtaaataccattttcctaacatgtgccacaggaggtgaggatgaactacgtcaatgtccgctttaaggttgaagtcgcgtttatgaatgacaagaccccgacgtacttccaacgtcggcctgtccatgtatgttgcttggtagagaggtccgatggcaatatgatcgatttcagacgtgcaaggtgagatcaagacctagttatcttgttatagggaatgctgatgcccttccagtgcgatcaaactccaagagaaactggagatcgagctcacggcggaattgacgagtgctgaccatgtcatcgtgtgccatgctatgtgcgatgaaatcggtaagacttttgaacgcgaccaaagccacacttatatacatgctgacaattttacagcggggacgtggagacaagcagagctcagacttaatctgccttctcatctctttgctgctatgagagataagaatgccaatgcccaaaatactggagcatcgaacatacaatctcgccactccgaggggaatttgagctctaaggatgcgacgaaactgaaggcccacacgtttcgttctcatgatcgagtgatggctagtaccaagaccaagtctcggcgggatgcggacgattttgatggcgatgacttgcagctcgatgacttcctcattgcgaatgaacgccgcgacaaaccaaaggaacctacaaagccacaacctccgcaattcgatgatatagattggttctcaatcgacgcaactccacctaccccagccaagagagcgccaccgaaggtgtcaaacccccaagaagatgattgggcggtagatatagacgaagcagaggaggaatacgagccagtcagacttgcgaatggcaaatgggcttgcaatcacaagtgcaaggataaatcaaggtttgaaaatccactacttcctttattattgatctaaccatcctagctgcaaacatttctgctgccgcgagggcttggaaaagcccccgaaacctccgaagcggagcatcctcgcgactcaaaaagaagctggcctcaatcaactgactatctctgccagcatcaccaagccaactcctaagaacagttcgagctcgagaaaccaaatggccaaacaacgcgtcacggggcctaagaatgacgatcatgtttcgaagatgaagaagatgtcgacgtcgcaagctggaaagaaggacccaagtcgagaggaatctgtcctttcggaaagagacaaaaaccttccttcatatacgaaaaagagggaaaagacgtcaaccaaacctctctacagtgactacggcgatgaagtctttgatgatctaccatctccatcacgtcttctcgggaacaggggatcgggatttgcaacatcggtttctccagtagtgaacaaccagacaaagagcaacatcacagatgttgcagtgaagaaaacgaagaaaacgaagaatagagaccccgagccttcaccctccgcttcactgcccaatctcgctcaaaaagagcgaactaagccatcaatctctaaaccccaacacgagataatcgaaatcccagacgacacaccaccagactcaacagaattgccaatggcaatagaaaaagggtctcctgtaaagcagagcacgctgccactaccagaaagagcagatcaaccgcccaacctgaaacggaaggctagtcaagacgaaacccgaacagaggaacctaaaaagcgggcgaagcaaagtccttttgtttcggctttaaagactcacccctcagacctcttgagcaatgaacaaccactgagccccgagcagcctgcgtctcctgtttctcctgctgctgtgtctccgatgctcgccggtcggatggatttaactgcaagatgggacgatggaatcgatctgcttgatgagttcaaggatattattaaattcatttaaactctggagactcgctggtcgaatggtggaatctttgctttttccatacatttttaggattcattcttgagcggtggcatgtatggtgctggattgctgcgaactggtacaagttatggcttgccttacttctatatagaatattggtggctattctatattgacatttagaattctcagcatgaaataatctgaaagaattctgttgctttgagattctccgatgtctcaccaagtatgactccaaaacactgggcacgttggaccgtttttgatttcagacattcatactgaaggtcttatgttcctttcgtctttaaacgtttagttctttcgggttttggttacgctcaccgtccaaaatgatggacatggtgttgactggtaactcatgttttcgtctcgtgtcaacttgatatccatgtgctttgctacattggttatcgactcaatcaggggtagatgtcaggggatagctagtatttcgtatggcagtgtgtgtcagtttacccaaatataaaaggtcccttgcacgccgggatattctcggatacacacaacattcagcagcaagatattcactctccaacatttgaaccggcgttgtcgccagtcttccccattgaacattcatttgagcagtcttccaacatcttcaattgcaaaaacccatcacgaaaggcgacagcaggaccgatccgtctaataaagatgacccgcatgcactacgcgtctgtaagtaaacccagagaaaggccgtgcatgagggggaattgatactgacaaattggcacagcggacgatggaaggtgtcgagatggccagaatcgccgccagagacttggtatgagttcttatgcctcgcccattgacatggatcctaacttccagtagagacgaagacttcctggaggagacaactgcgacgcagcctcccgcagcccggcagtcaagatcgatctctcaggccgcaagctgaccgatgagggtttcgatatatttatcgatgccctgctggagactctccagaaagagaaagacgacaagcaccccgacggctttgttcgcctattgaagctccagctgggcgggaattgtctgactttcaagtcgttgcccaagctgggtatggcaattagactcagtactggtgacctgagtgatttcgacctgtcttacaactgcatcgaggtgagtactgctgggcaaagggcggcgtggaagtatttcttaaactcctttgaggagtgttacatgctcaagagagtcaacttctccgggaatcctctcggttctcccggtgtggagattttggctagggtctatatccgcagcaaacttgcttaccccactgctttctctggggaaggtcatgatttcagtgttgaccaaggtgaggacctgacctccgacgaccacggtcctggcgttgattcctttttctctctgtccatttatgacgacgggggtccggattccgcgcatactggagatcaggatccaacacctcagcctcagggagcgtccgagaaaacatccgagagaaatcgaagacacttccggaaaactcgtggactgcgatcagtaccggagctgatactgaccgaaatccccatgtcatccattggcgttatccacctagccggtatgctgtttatgcaggaatcccgcgagttcctccgcttctatcttccgaagacgaagggggccgcctctcgaccggaaaccgagaaaaagaatccgagcatcacttggctgttgaatgagcacttgcctcaacgcgtccgtcaggcgccatgctgggcaactgaaatggcgcagcgagggttgagtttcgaccccagtttgactgtcgcgattgacaacttggagactcctccgagttcggatttcttgcggggaggcaaatcgtggaaagtgagacatgaaataaaattcctatgtgtggtcagggcactctacgcacctgcgagtgagggtgagatccgaggttcggagatctggacaatggctctgaagatggcgaagatgatggaaaccgttctgtccaatgaggaggtcattcaggtaagtgcaatactttgatagtctcgagttggcggtgctaactgaaaaaaaaaaggctcagctttcttccggtgggaaggtctttgagtgccttggacttgaaagggatttggtggatgccatcaacattggagtgtttctctctcgcaaactactgttggatggacagtctcaggaggtttggcgtcttgggatgtcgctggacatatggtctgatgtcatgggtatggccttggacaaagggaatgttctcactgctcagcagaggatgaatattcttgcatatgtaggtaggggtaatcggcgcgttcctgagaaggccatggagatatggaggtttcttttcgatgtggattgtgttatgtatcacgcttcttgatcctttttgcgtctgatgcatgttagaccaattgacggggtgtttattgtttattttcgactgacagagaaaggtagtggccgctcttttgtaaaaagatatcaaaggaacaaccataggatgtacatcgcttctcttccctcttactctccaatatacaccggtggacatccttacttttctctcatcgcacccttagctatggggccatggaaggatgttgacaaagtctcttagctgttcaggccatggacaagccgcccgtacactgggagggggttgtacctggtttgtgaaggggaagctgcccgaatgaacgcgtataaaaaagccaaaactatgattcaactaattacgtattcatctatcgccgtatttccaaatgtgcaatgagtatttcattcccgatatcccatattgggttccatagtcttcgaggcgcgaacctctttatatcgccgagatatctcggcgatcataccctgaatcttcttggctgccacaaacttgagtccgagggtctcgaaaagttgagttgcaaggtcgagatcagcgatggctcgcgtgtctctcaagacaacgccgaggtcatcaggctgagccgtgatcgcatagactagtgatagagtcgccgtgaaaagggccagaaagttcaaccagttgtacgcgaatcgttgttgttgatgcatgctgaatgcttgacgaagtgacattgacgctgccgtctccagcatcttgatccgctttacgtctgaaacggggaatagtggggacggtctgtagatcatcgcgagatgggtatagtagttgaagtcataccacgttgtgttgagatgtggtactctgtcgtcgatgtctgggagcgggaagggcatgccccggcgccaggcgagtagttcctggtgcaaggaagctattattgcttcgcgttcttgtaaattcatctttgagttcttgaaattcccgtacacctgccgtgaaatcttgcctgcaattcttcgtagtgatagaatgtgtagcggaacggccatcatcgatggctggagggagttttgggggccgatgcagtcggagtgtatatattcttcatcggcatcttcgaatggctgtttccactcagttagacgatattggagaagggaatctcagctcattcacacaacgatcggctcaccgttacatctatgtcatcatcatgcaatgcaaaggggcggcccaaggtaatggaaacaacgctaagtgtcgctattagccggctaattctggacacgaaaggaaggaagaggagaagaacgatgactataacctaccgatccatcatatatattgaaaagaagatgcgtttgcgtctttgctgcccatcaagaggaaatttgtgatacgatgaggccgcatggagccccattcctagggccagacgggctgcggtgccaacgagaaaccaggtgtctactttcgtcagtgtctggaatatccccgatcaactgcctgtcactcactaggacctagctggttgaaaaaggaataagagacttggagcattatagcctccaaggcagactagactctcgtcagttggattctcctcggcgctgaagtaatagacaggtgtgtataccatctcatcaccccccaaagcttgctcagaatattgcagggcgttgttgtaaaacatcatcgattccgactcctcagtcagggtgacagaagagtaagcggtggagccgatggccaggaccatccagatcctgaagatgtcgaggggagcctgtgtcgccaagctctgaggattttgatggattctttcgaacgcgtccatgacctcggaccgcttcagaatgggatacaaggtatgggagtgcgcaaaatagaaatctaccagtcgccgcacgtatgtctcatctgctggccataccagggagccaagaggcgcgtcggatccggtaaattcagggaggaagaggtcgccaaacagtaacggatggacggagatggattcactcaagttctggaagaacgagtcgttgaatggatctgcggggaagctcaggtccaagagattggttccggtagtgttgtcttgctgactattgaatacaaagtccgccttgtctggtgtcaaacgacgtaggaccatctgagtcagctctgcgaatgagaggcccgtggttgatcccaagtgtcgttcagcagtagcttctaacgagagcgctgtaagttgctggccaaatgtcgaggtctgacttgatgtgggccgtgggctgacatgagggtcttgtatcgggggggtgttgtcggcaatagtggatgcgtttgctacctcgcttctgtaaatgccatgggagctacattctgggtacactgttgctgtctccggcacctcaaagtctctgaatgggggattgttgtccaagacagccgtggcctctgtggcgtggggcgcgttctgctctcctacacccactgccctccctagacggcgaagcttttcttccaggccctggacatacctgcgagcatgtcagcagcatacttcaaaccagtcgagcaaacgagcggcactgcagatctatgaatgagagaccgagagacgtcacatccactctcatgcggcgacttacactatcgggtacgaagcggtttggagatcatcgtcttcgaagctacatctcatccgcgccgacacgcagttcctacatgacggcaacaacctgtcgcacctcttcttcctcctgtgacaacgcgaacacgaagctcgagcccttgctggggccggagatggggttgccggtgcaactcccgctgcagcgctgtcaggcattgggcaagagttgcagagacttgagaagtgtgctggaataaaggcaagacactctgcagttatcttttagcatttggctacccctctagctgtgggatcttctaaacttgacttggaatattttgaccttatctgctctagactcccacatttccccgcattcagtccgggacaatcccatcggggaccggggatcttccgccgacacacaaagaaggctgttgaatgagacgtcagttagatacaggtggacctggtcgtgtctgcagtatctaccagtttcgtcccaaagtgctatcccgtgcgtcgcactcctacgggcacttcactacatgaggatatccgctctctcagctcgagataagaacccgattatctccaggcaatcgcgttacgactattctgacaagatacccgggagaggattgattttcgcgaggacattattggagccgagtcaccactcacaaggctatctgaactcttcccagacacgtcccaaacatgagtacgagaaaagcaacaccacgtcgttaaaatattgttctctttgtcccgtctattctaggtatcgacgactgcaacagccttgacctcgacaatcattcggggatcggggagctccttcacgccaatggtgaccctagccggtgcactatctcgggacttaaagaccttgttccactcctcgttcatgccagcgtattgggttttcatgtccaggatgtacacgacagcgtcaatcaggttgtggataccgcccttgccatttgtcgcgcccttgattatgttgtcgacgttctcgagaaccgccgccgtttgcttgcgaatgtcggttgtgcacgttccgtctgggttctcagtgacgccgggccaggtaccgtcggggcgacagcacgctgtgccggagatgtagatggtgcggtggttggaacggggtgcaaggcgagcctgtgggaatctggtggcaccctcgggcgcatcaggcttgactaggtatgcttgtccattgggagacatggtgacaaagtgtagctggcttccagctttcagtagttgtttagggaaaggataatggtaggtatagatggtaaagtttgataatcaagacatgttcgatgaccaaattggtttctttaatatcctcaaagctgccccaatctccttgacttttcatagtcatgttaaatatatccgcattgggtttcctcttcttgcttagctgtcggagatggcgcagccgataacatcgcggggtgtgctcagtgtcggggtgtccgacttgcttcgacagtgacttttgtcggattgtccgaagacgttacacgattacggtctcttggtccattccacatctgcactcactatatccgccgacgtcgagctgtcgcatacttcgtcattgcatttcaaccaacagcgggagattcggccccgacagcgcacgcaaagattttagcggtacgcggccaccatatagaacgttccaaactaggaaagttctgcgctaattttgcccgcgatacaacaaacctagattctagctaggatcgagaagaagaggccggtgtaaaactcattcctggccatggatcaactacctgccggcataccggggaaagcatccaattcggacagcggaaccgaagagcaattcgagagaaaaacagcacatcaaatcccttcagccatttccacagagagcatggatgaacctgccgttacgaaatatcccgaaggaggctggaccgcctggggagtggtactagggagctggatggccatgtttgggtctatgtcttttatgaatagcataggaacattccagacatacctcctgcggaatcagctcagcggctacagtcctgaagccgtgggatggatctttggcgtctacaatggtttgacgtttctcctcggtgtccagacgggacccatcttcgatgcgaggggcccccgtgcactgatatgctgcggaggaattttgacgattctttgcctgatgcttctgagcatatgtacagagtactggcatttcatgctcgtgtatggtgtcttaggcggcatcagtctctcgctcatctttggtccggctattgccatcgttgcccactatttcaacgccagacgtggatttgctaccgggattgcatcgtctggaggcgctgttggtggtgtcgtctttcccttgatgctccagaggttgtttgatacggttgggttcgcttgggcaacccggatcgcgggctttgtgtgtattgtcacctttgtccttgcaggtattctaattcgtcctcgcttccctgtaaagccattgaccctgtcaacggtgcgccctgatttaaccatctttcgacaagcagggttggccttgacaagtctcggcgtcttctttcttgaatggggcctgtttattccctttacctacctgacatcctacgcgattgatcacggaagttcggcagccttttcctacatgcttctatccttgataaatgccgctggagtgtttggtcgatgggtgccggggttctatgccgatcggttgggaagattcaacatgctcatcctcactgttctcggctgtctcctcagtattttgtgcttgtggctgccaaccaaatcaagcgagccaatgatggttgcgtttgctttggtctttggcttcttcggtggcagcaatgtcagcctagctccggtatgcattggccagctgtgcaaggtcgagtcgttcggccgatattattctacggcatatatactcgttagcatcaggttggtagatctcccctggcttgtcacccctgcagaactgacaccctccttagtatgttcactggaaccgcactgggtggtaaattcatcgaagtttgcaacggtgggtactgcggtgtgattgccttcgcagctgcaagctatctggcgagcttcatttgtcttgttatggcgaaagctctttgctgcgggaaaagtaatatttggtcaaagttttagtagtaaacacacaggatgtgctacattattgcataaatatcatagattcaggcttccaaagccacactgaggactctatttgcaaaaaatgtgtcgtcttgcttctgacattcataacctgcccaggtggattcgatggcatagctggagggcatagcccatggacatatcatctcagcataacattaactctcactacaacgagtcactagccttcataaaagctgtgagtggacgcaaaaattcacgggatatagtatagtcactttcaaattcaatcctataaccatcctacatcaccacggccaggagaataattctaaagatttcttcctacgatttcatgcttcgtatcatgcgacgcctggcccacaaaatatccatcggacgttccgactgaccacatcctggagtgaatctctgagaccatactatataagctcgcttcacaaacactggaacaccagctacaccacgttaagccaccatgtcagaacctatagtccagtactatcacatccacgacttcactttcgaggatggaaccggcccgacgtcgatccagctagcctacctcgacatcaatccaactgcagacaaggcagcccttattccgacctgttttcgcggccggcttgcgacaaccctgaccttcagcaatggcgccctcaaagactacagagtcattgtggtggctttgtttggaaatggcgagtcttcgagtccatccaacatgaccaacttccccccgtcgctgaactaccaagactgcgttcgtgctcagcaccagctgataaaatcatatctcaacatccgagctattgatgtggtggttggtttctctatgggaggacagtgttcgtactactggaccctgatgtaccccgagctagtccggaacgcggtcataatctgctcgtcggctcgtaccagccgtcacaattaccagtttctcgagggaccgaaggctgcactggagtattccgtcgattacaaaaagggagaaaacaacggagcctcctcacaggcatcggccgggctgcgggcttttggcaaagcatactcggcttggttgacaagccccgaatggtttgagaaggagatgtacaagtccatgggatatgagatgttggcagactgggataaggatgcagctgggaacaattactacaattggaatcctgatgacttgctcgccatggtaggcgtgtggcagagaggagatgtcacttcgatctcgggagatgcatctttacaagaaacgctgtcacgggtcaaagcaagtgtcctggtgatgccttgttcaacagatcagtactttcgatgggaagcatcggagaaggaggcacatgcgattcctcgctctacgttcagggttataccatctgcatggggccatttggctggattgggttataacgccgaggacaaagcttttatggatcaggcgatagctggctttttgaagaagcagtgataaaggaagacttggacgacatatttctgatatgagcttgaaaaagtatcatttaagtatatagaccaggataggccaagaaagtcaacgagatatcattcgctgccaccacccgtgctctcaagtatctctcggccgcgttcaaacaaagccgcggcttcaatgagctgttcatcagcccaatgccttgcgacaatctgcataccaacgggtagcgggacacctggatggccttcggtcgtggaaaagccacaatgcacattcatcccggggtgacccgtaacattgaagggacaagtgttgctggtcaagccaacagcggcaccaagtctatctaggatcgaggcccttctcccgtcgcgacctttcggattcgggtgaggcatcgcaactgtaggcgcacacggcgtgacgagaatgtcaacatgctgcagggcggcatcgtaggcagctctgagtgcaaagaccaggcgatgggcctttgcctccaggcctcccttgcacgcctccctagaaaacttctcactcagcatgatgttaactacagctgggttgctgcatgtcagcgtgtcgtatgtctcctgggacggaggccatttgatctgcgtatgcggcgaaaggaaagacaggtgaccagaagggcttccctggcacagataactggacatggacggccgggttgcagctgtccagactgctggaccttgttgatgcattggaacagatacctcgacgacagaggccccgacagcttcgaagtattgcgttgctgctttgtagacgatgtctcgaacgtcggcagcaactccgggcatgtggaaggattcctccagaaggccaaccctcagcttctgaccaggtctcgatgtagaccgcatctcttgtctcgcctggagcagcagtttcaggtaaggctttacttgatgtactaagggagtttcaggggtcatccgagggtcgtagccatcgtagcctgccatgacctccaacagcgcggcgacatcttcaagctcggccgccagcggacccaggtgatcaatcatcggcgacattgaccctgcaccagtgtacggaaccagaccaaaggttggcttcaacccgtagagaccgttgtaagaggccgggattcgcaccgacccagcctggtcggtgccgatagacaactccacagtgtgacccgtcgacgagtcgctcctttttaatgccagacgatgagccgcaactagaactgcagagccactgctgcttccaccagcggtgtagttgtgcaagagcggattatgaactggccctgtcgctgaggtgaaggacaggggagacgcacagaagctttcgcaagtcgacgtccctttgataatgccgccggctctgagaatccgagacaccacgactgcatcaataggggagatgggatacccgtcttcctgatggaacaatgtctggggcatgccaagcgtggtcggcagccctccgacagatatgttgtccttgatggcaactgtacgtccacgtaataagttgctagctggaaccgcagatcttagatcacattggtggctccagccgttaaatggattatcttctggtgctggtttcacgaatttgcgattttccagcgtctcctgaggaagcaaatctggcggaatgtagtcggatgcattgtcgatgcttctcaagactgtctcaagcgaccgcaacagagtaaggtaatcctccgcgtcttggttatccagagtctcaacgtgaagccgggctgcgaaataccgtagatctgtctcgcttatgttggagctatgtcgcttgttaggtgtcgagatgatccaagttcatgtacaggggttgcttaccctacaccatctgagattgatacgacagacatggcgatgatttgctcgagctgagagaggaggtgctattgcctcagggtattatggtttccgctttggtcacggccttgaggtggttcttaaaggagtagtgttcactctagcaacccatttatgtcttgggcatgtcggccgatccgacgggattttgcaagctatagcccaggcccgcactaacagataagttgagagaaaagtccacattggataggtattaatcccatgtactaaattgcatgcaacatgctggttcgactgatacatgtcctgatcttgccaataatttctttctctaaatgctatatcccttcattcttgaccattggcaagcagaatgcggcctccgtcaacacaaagtgatattccatccacataggcctgaacacgaaattgtcagtattcccccacagcaagtgggaataggaaaacttcaaagaggctgcttagacttactcccgcacggctgacgaggtacaagacagtgccagcaatgtcatcctcgtttcctgctctcttggcaggtaccttgtcgaaaagggcgctgaagaggttgccttcctctccaacagggttcatgttgcttggaacaactgtatcaatcagaaactgggtcgatctatgtgggttattacaacgcccgatttcactcacagcctgggttaatccccaccactcgtacatagaagcggctgaacttggctgccagcagcttaaccaggtgatcagttgcagctttgctcgtcgcataactcgttaggtccacgttcgtcacgttgtgcatgcttgcgcatgaactcgttataacaaccactccgcgacccccatttcgcccgagcttgccatcgggcaattccagccgcgaggccgcctctagcaatgggaggaaagccacggaaaggaagtagtgggcagttgtgttgacgcgaaatgtatcatcccagtccgagtgtcgtgaggaccacatggaagtttgcagctgggataaggatgccttgagcacgttgcattggacaggggggtcgcgtctgatgccggcgttggaaattaacatgtcaacgtgcttttcttgctggccaatctgaccggcaatattttggatggcgtccttgtcagaaacattgcaaggcattctggaattcacattagaatagcctgggggcttttcttttttacacgttgagttcgttattatccgaacttacccatgtgcagatcctccagcttccctaccgagttcgttgagttccgccacgctcttgtcagtggacacgcttggtaagtcaacgaggtataccttggcgccatttgtcacaagcccctgttactacaaagtcagctgttaaggaccataacagtatatggagctgcaatttcaagccagctaagacgatgcacccaccctggcaatcataaagccgaggccactggcgcctcctgtcacaactgcaacgtaccccttaaccccgaacaaactatcagtaagaagagaagacatatcgacaaggtaatggatggttgtgctggtgccttcgtagacgacgtaaagaaccacgacgtttgggctacttcaatagggcattggtaagcgctacctatattccccgtcggactgcccgatgagtcgtcgggaattcgactctggggtagtatgaccatttcgcgctatccctacgcaatacattgacgtcgactggctagcctgatctcgtaatctcgttctcgttatgccgtattactcggatttcgtctcggccttgatgcaggtcgatgcatgccaggatcctgtcgtccttgtcgatattcttcttccatgtcggcagatgtactgtcttggcaagcagccaccctttagattattatcgaaaaggtgtcgatcacacatagtgcttacagtcgctgttgtttaacaacctgttcatctggacgcccccgagcagccaacacaatactgggacatccaacagtccccagatatacattgctttgtttaagagatgtaccaatattaaagaatagaataggtgccgtggtatacctgttaatttctaacatggacagtaaagactataggaaacagctttcacaccaagtgacatgcgtcagagcacgctccattagcgatgtaactgttcctatgttggctcccgcatatcctgaaatacattaggtacactaaaaggcttcgagtacacaccgacaacagtatcgaaaacaggattactccttgtagtgctcgcgggtcctctgctcagcgacatccaagcactcggacgtcatggccgcgtcacggggaacgagcttgaccttgaattcctttggaatagcaaccagcgccgtcttgaactggttatactcgacatagtcagtgtttggcgggctctccttactcgcgacgatcttgtaggacaacaaaatcctcaccaacgcggagtacaagaggcgagaggcgaggtactggcccgaacaagcacgggaaccagtaccgaagctcaaatgacccaagccagtgctctcagcctcggtgggagggttgagggtcttgagccaccgctccgggttgaagcttccagcatcaggtccgaaatgatcgacatctgtacgcgtcagcgcttgcaatatagccaggacaacgatttcagcgggccacttaccatggttacccgcttgggcattgatcaagatcatagtcttaggagggatgatggcaccattccagttgacctcggagacagtcttgcggggaagactcatggagctgacggtgtagtatcggccagcctccttaacaatggcattgatgtagggaattgtctcctctttgaagcagctagtccaggcatcgcggtcgtcagggtagtgtcgcttgatgtcctcgtaggcccggtcctgccatgcctgtccttgctcggttgagagagatccaatgcaggaggttaaagtcccgggaatagtctcaaagccaccggacacgagagacaagcagatcgaagagacttcgacaccagagagcttcgtctcctgatccttaaggatagcagcagagatgcaaggcttatccgtaccgttcttgatcatctcgcggaccttgttcaagaggaggtccagataggtgtcacgtcgctgacgaagatcctttgaacgggtatccttctcgttgttgggaaggtaacgaagtgccgggatgtaatcctgcaggttctccgaggcgctacgtaatagggaaatagacgatcccacatggagaatctcacggagcagttcgtcgtagacagcgtccatacggataccgtagcagagcgtcagggtggtgttgagtgcgtaacgctggatataagggcgaatgtcaatctcgatctgaccgttgcggctgtcctttttcatatctcgtaggatgcagtagctctccaggtcaaacatggggtagtagttcctcaaggcaggccgacccagagcagtaccggcagccttgcgcttctttttgcaggactcatcccagggcgaagatccaatggtaaagccctgggtgctgctgatgacgccgtggaaggtgtagagcttagggcggtcaataactgcattctggctgccgaggagcatcttcttgcagtcatcaaatgagttgacaacgacggccctcgtattccccagcttgatctggaagacagagtggttgtactggcgccaccatttctcgcaaacagtagcatgatcctcaccgagcttgagaagatgtccaaacataggaacagcaccagggatctccggcatacccttgatgtgaggaatgtcggtggtatacataaactgtcgatattgtcagccaagaaacattgataagaaactagcaatggcaatgccgcccgtttggtcacaagcacaacttacagtgtaaagcaaataggtgaggagcaccaccacaaccgccgtcaaaactggtctagcatgctcctgttccttgagttggtgccattgatagctcagccaatagctgccttcataggccttagcatccataataagtgagaataataagtgttgacttgtgagacttggggcagtggagaatgtgtcgttagtgatggtcgaagttccacaggttgtcggaatgatccatccttaacaactatcacgaaatcgaatggatgcttccttatgctgcttcgtccgggtaggactccacacctcccctcaattctggaataagcaacgtgacgatgctttcgagtggtgagcggatgatccgacggcgtcgaggtattttcattatttacccctctcaagactagtcgcagcggtactgccgactagataaggcttccgctagtaactgcgtcttatcggggatttgcatgaatatcgtagtacattccctttaccatggcagataccaagttcccgcggcagtttctttccgacacgatcggcatgtccgacgaccgattattcgtccgatattggtatctcgtattgtggatcaaggtcgataagggcgatccaatgtagtccaaggtacgtaaatccatccagcagaaggcttgtagataagcatgaacctggagcatgaacccttatgtggtgtaaaccaacctaggtgcatatgtagttatatccagcccacatcacccccacttcagatcaacaatattgaataccatgaataatatattaccaaaggaaaagtacaaccaagaaaagcatgactatcagacaaaccagagagccgattcatttgctgtagaggagccgctccacccgtctaccaaacgagatctcaatgcacgccatgcgctcttcatcgcctggggtggcactgttggtactggccttttcattaccactggcaaggctcttgcaaccggtggaccagcattcctcgtcgggagctacgtctttgcgtctatcttggtgtacttcatccttacgggagttaccgagatggccacgtttctccccgttcgcggaggctctatgagtcggtacggcggccgctttgtgtccaggagtcttgggtttgccatgggctggctttacgtctattctttcgccatactggttcccttcgaactcacggcgtgcgctatcctcatagacttttggcaacccggtatcaacagcgcggtttggatcaccattctgctagtcttgttggtcattcttaatgtcttgccggtacgattctacggcgaagcggaattcatcttcactggtgtcaaactggctaccatcatcggcctgcttcttctgtcatttatcttgttctggggtggaggtcctgacaggaatagactcgggttccactactggaaagaccctggtgccgcaaacactttgatcctggaaggtgacgctggcaggctcattgccgctatcgcgactgtcatcagcagcatcatgcccttcacctttacacccgagatggtggttggaacagcagccgagatcaaagagccgaggaaaaatgtaccaagggttgcgaagcatttcacctggcgcctggttgttcttttcgttggcagcgtcgtcggcatctcggttatctgtccctctaatgcccccaccctcacgagcggaagtgatgctgcatcctcaccgtgggttgcggatatccgtcaagctggaataggcggcctggacagcgtcattaacgccgtggcactcatcgccgcttggtcaacgggcaacgcgtttctttacctctccagccgatgtcttcactccatggccatggagggtaacgcgcctcgaatctttcaacgttgcactgcaaagggagtgcccatctacgctgtgggggcaacggcttgtgtctctcttctggcctatttgacactcaactcttcctcggcggctatcttgaactggctattgaacttagtcaatactggcgggttcttgtcctgggtctgttgctctattacatatcttcggtttcgaagagcctgtgaggtgcaagggattcccaagtcagggctcacgcagagatccccgcttcagccatactcgtcatggattacgctcatttgttctagcattttgtgtcttctgaatggttttacagtgtttttcccgtccgaatggtcgatcccttcattcatatccgcatacttaggtttaccggcattttttattttgtattttgctcacagattcacttatcgcaaagagccatgggttattccctcgcatcttgtggatctacagctagatccagcagagttggaggatcattgaaatttctctcttctctcgcctggaaggagaactatgtcatcagattcttacaggtggcaattggaaatagctcggagttacagcggtgtatagtcaccagtgcgctatatcgtatttttagcaatttctactcagagtaataagttgatacattcgttgttcaagacaggttgctgattcgaggaccaaagccgctctttcccaaaagtgtaacttcctttgataaaaatatcgatgatggaatcttcaagccttgaataggccagccagaccatcttacaggtatgaatgcatcaaataccagtccgcacgccagcaaggaaatggaagaaggcaatgctgacctgaagctacataggatgtcttccagggctaggcgtttccctcctcaattgcagtccagataagctctgcaaattcgtggagcaacataatcccctctccttctcgtgggtcattcaataacaaaaactaaagtggaataatcaaatctccgccctaggtggcgggttcctagccatttccccctctttttgtcatcttctacacaacttgagcatgctgtgggaatgacattgtaggaacctaagatttgattttcgatatttcctagacctcgttcgatatcgatagtgatgcccattctcatccgtccgtttaattcacgcaccgagcaatgtctcttcgcatttttcagcggtctgcgaatatccgacttcaagagctaatgttggaaattgatgcccttgccgtattggactccatgcccggtccgcttgtttttcttcgatcctcgccatcgatacaggtggatggtattaacactgcaaatatcatctcaggatccagatatcggagaccaaggcaggatccagactatgcagcatacctcaccatggaagactgtatatgaggatggagacaatgctggtctccggtgaacgcggggttcaatgagacgttgaaagtctcagcgtgagatattggtaaaagaacgttgatctcgatgactgagatgctgaccgtgagagatacggatctcagatgggaccggcgtcccccttcctcgggttctgaagtacggctgtctcgtaagaagagacagtgaaagcgacgaaaaagtgaaagattcgaaattgtaaggatgtaaatagatggcggacctaaatgtaggctctgcatggatttgcacatacagagatgtgagagtgtatgaaatctctgctcgtgggatcgacaacaacaagcaaggtagtaaaccaccaaggtccagactaaagtggtctaatctttgttgacgatgataggatgacaatcacccggcagaaatctgcgtagagaccctgcctctcatcccttacaggcctagcaacaagctgtagacctaaagctatttaggcaattctccgggcttggtgggggtgagttgtaagcctcgctagaccgaggtcccgagtagtttgttgtagagagatgctgggcttggcactaacccctttgcacgtcgaccgttcgaccctacaataatatgtgttggggtgcacatcgaggatattgatcgatggtgaggtcggatcaatactgagtccctggcctcatgacctattaagatctacaattgagatgagaatgaaaaggctgtacaatatgtacatatttctccgaacgtggtttagtccatttaggttaagctcggggacattagtgatttccttttcgggatgcggatgttgaaagctgactgcttttcacccctaaagactcaacttgattctacccacaccaccatcaaacaagcctaacccgaattcgcattctaaaggatattcgcagtgatctgctccatcaaatattcagtatgaccgatatacttccccgcgagagggctctacaggagtctggacagatcaacacccttcagcaagaacgctgggatctctggcgtgaggaagaatccgaaaataccgaacctttcaatatccatgaactactccggacggaagtcaaacttcgagaaactgctcagcgggaggttgcccttaaagagaaactcgcaatctatcaaaagcaacccaccaccgatggaagttccgctcccacagaaataatccaaggcttacgcgcggaggtcacaatgctgaatgagaaatattggatgctggagcggaaatggtggtcgattaaaggttcattaatagaaggcccgttagctcgaggaatgaggttatggcgatcacacccaaagtggtatatgcattgcgtgctacgcgaagattgtgccgggaggggaggatgctgtggcagggactgcgggtgctgtttcaatcgccatctaccaaaacggaagttcgcagccggtcattgcactgtggaatgtcactgttgtgagaaagctcgtggatttgagctcagctccgagcaaaaggcgcgagttgagaagatgttcgatcttagtgttgaccgggggtatttcaaaaggatccggcatgcctcgttgctggggctcatacaccttaacctcgacaatccttttgatcttattgaggatcctccgccaaggtatgaagcacaggcagtgtgaacaacttcttgggatctagctagtcaaactcaagcatccattacggaattgctgttctgaattgtgccttggggcaatgcttagcactagtacatattccggtatagtaggaccggcctttttttggtaggctttggatgctttccctcaatggaatctttcaatttgttctctatgcattggacatatatcactacgttcaatgttgtcaattttccctttgtttgtcatctcttcgtttcgaaaggctctcggccggccgtggctttttcatcccaccttgttcgcaatccatcaacacctcagatatttgaccgtgatttgcgttacacatcttgtcccctgataatatttccttctcgttgaatcgagcgtcatattgtggagccgggcacaaaggagcggagggacacggctagacaacaatgctgcgacgcttgccatgtttttcagccagacggaagtcgaggaatggacagtcgatcgggggagggatcgctcaaatgagcacgctgagccgaagccggtcgaggggatgatctgtgaatgtttatttcttcgattggagccttgcgatatgttgcggaggggcacattgcggtagcaaattcccattccccttgcatgtatgcccccgtaaaagactgacgggtagtttttgtagtgcgccaaaaaggtatttggttatttcttatatgtagtgttgtcttcgaaatgacgtaagatgccatgtgcgtattctaattctaaaggctaaggatttcatctcctgcagtcatgtctatgttccccataaatgctgattcaagcacggaatgtggagatactgcagaaataaagttttctgctgtttcattccagttgcgagacatatgttcctggcaatgtaaatatgtaaaacatgtagaatttgagatgcttgaagttgccttttgggatattggtggtatatttaggacctataatatacatgtaggcgtgcgaaaaacctcaatgaatttatcctattcactgacaatagtatctagccgatgctacggcttctcatagaagcgctctattggagttgcgcttactatgttagcattacctaggtattctttgtcacgcattttaggtaggcggtgaagtatgtgggcagaacaattcggctagaatcggctctggctcggcccgtcctcggttcggctcggcccgtcctcggtaacccaccgcccgaacctgcctgttcaagtgcaccgcctttggggtataaaggggagctcgagcccccggacctcttgctcttcttttttcccccaacttctctttgcctactggctaagatcaagtgtagtacctgttctaatcagcttaatcgctgattgttctgctcagcagaacatctgattattccaatctttggaccttgcgacttggcctctatgcttgcatatgcctcgttgcactgtgtcactgggctgacactacccccagttgatgcgactccttccctttttttcatcaattattcggcttgtccgggtgtttggagaagaaaattgctatcctgtctcgttgacgcgttatgaccaacctacaagtgcgacgcgtctcagactcggtccaatctccaccggataccttcaccttttcattcaccacacttaagaacgtgtctgatcaatgaccctcaattcttcaggttcattggtgccaaatatgccgaggcagcttttgaaaccccgccagctcgtgaacccgtagaactctccgcctcccgaacattcgctatgcaattcatatgtcacctccccaagctctacactagcaccgtggcaaaagcttacgtcgttcaccagagtctttatatgatcgtcgcagtttacacttacaacgtcggcttcagaaggtccacaagtccagctattcccttctactcgaaggtcaacattgagaggaagttgattattatttttgcattatatcttcaggtccagccccagtggatgggacaggttcaagggggctgcatgtcctagactggccaggatatgcaggccaccgtagaacacaagagacagtctccgttggccgccgtgatcgaggtcccaaatgatgtactgtctcatatccgaattgtcaattattccattccgctcaatagtgccaatctcagggatcttgtgttacattctttctacgtatttctcatttacatctgtcaacttcatatgtaacgccgttgcctagcgagcccgtcttcagagacaatgacctatttgccaaccccaacaataaaaagcccagatctctcaactcttttacccattcgtgttgcctatacactcccatgtctcccacctaccagacctctcctagcaacaagcctttcaatatgttttccaggatacttgattatacggtctatacaattaagtctgaggtgaacactacgatggctttttggaggcctcctcccattgtcagttttatagctagagtactggaaaggcagatcaaacaataaaacatataatttacatttctattgacatacaaccaagaattttgtgcattataaaacagactcatcgcgtgaatgctagttggtgtgactagaaagatagctattatagatctgtatccaaggacagataatcttatgtgagggttccgctggttattgagaggatactatgtcattcaaacagttagtgaaacaggctatccagtggtcaaatagtacctctatataaccgtgtgaagggtaccaacaccacccagtgtttgtgcaccagtcgttacaagattttccaccacttattagaaactagaagttaggtatccgttggatgtcctgctcatgcaaaggatatgaaacaacactacgtagctatgttggtgcgattggcacggtgttgcagaagaaagaatagttgggatttgacaaatgaggatatagtcggatgtataaggagtgttagtttgtaaatatactgccaatggaactatactgtatgtataggataaattagacctattccaaggtactactgggtagtactagtaacagattaagagttgtctaatatcttcatacttggaatagagaccctttaaggaccccaccctcatcccctagtcctggtatagaataccaaaaggagcaactaagccagacttttattgattggaagaagcgtgaactgaaatgcctgcaacacgatgcaaaagcgtaagcaatctgcgtcagcagtcttggctagcgtccatggatctgggctcttggcaaagagaaatgctgagttaggctttatgttgaagtcctggcgtaatatcaattactgaaccatttaagtagatatcgctgccatgcagtttgccatgcagtttgccataccattgcttgctccattggggtcctttgtgtgtggcaggcctttgtttctttgtccccataaagctatattagggggttccatggcagtagttcgatcatgatgttgaaaacagacaaagcccctggcctgccttggattgccggtactactacagatcacagatcacatggaggtgcttaccttgaaatgacatgtacagttggagacatagtcaagttgttcaatgtgtatgagctgttgatggggtcagcaaatttatgaaacaactgtgtctattatgagtatgattgatcactactgccaggaatctctctgatatagcttgatagcgaagaagcaacgaaggcctgcacggcacggtgaaggagggacctgaacggagcggatagaccgccacatggaccgcctgccggcacggtggataagggacctgaacggagccctggagcggatagaccgccacgtggaccgccttggccactgcggccttcgaaacacccaccgtcatttcggattccggcaaagctatagatccggttggaaccttatcgataagagttgaaaaagtataaagcgaggcatctcccccggaatcctcttcttctttctttttccccttcccagacaaaaggtggagtagccccccccccttcttccccaaatcacctactccatcgggggtctgaccagagcagaccgtcgttatttcaatctttggaccctgcgacttggcctctgtgcttgcatatgcctcgttgcactgtgtcactgggcttacactacccccagtcgacgcgacctcttttttcattaaacattcggcttgtccgggtgtttggagaagaaagcttgtctaatcccatagttcagtgcccaagtcacgtcaccttagcttcttcgatttcttcagtcccatacatacactcagacttttccaatgtagatgaccttttctaccatagtgtcctggatctactggcaactgttggacttcgtaacgtgatggtttagcgctatcaagactatcccgcacattttgacatttccacggattctttttaacaacgcccacacatgtggttggtaagtcatacaacatacctgcacactaatccgaatacgaatacgaggctgtggggttgggttgtgtggagcgggccgggacgggacgggacggcgccgggccgtcgtcggatcgcaccgccaaaggcccactgcggatccatcttgtttgcgtcgcaccgcaccgcctatggggtactgccccccagtgacgtaccgccttttgggcataaaacgaagtttcgagcctaaagatctcttttctttttattcctctccaccttctctttgccgtatggctcagatcaagtgtagtacctgttctaatcagcttaatccctgattgttctgctcagcagaatatctgattattccactctttggacctcgcgacatggcctctgtgcttgcatatgccttggtgcactgtgtcactgggcttacactaccccgagtcgacgcgacctcttttttcattaaacattcggcttgtgccgggtgtttggagaagaaagttaacatctaatacccttgcgttgatcttcttgtcacgggattcctttgtcagtactggtttgtgctctctcgtccgtatgcatttggggcatctttagctgaatctcgactaagtggcaatgacatgattgttatgattgtctactaattccaaaacatcctaggtttcgttctcaatgcccaagcgttttgcctcgtccgaacacctatgggtcgcctggttcctggcacatagattctgcgcatgcgattaccttggctccaatcaatgtgcctgtgtcgcatcctggacgtcgacgatcgcttcagtcgatagggaatattccctgtgtggccgcaatcctccaccgtacggcatctcacgtgccatcccaacctcgggtcatcctccatcgcatccatggtccatttccttttgcgattcctccaaagttcgaaagtcctttcgattcttcgtgtcttccttataccagacatggtccgaaccaagcgacaaaacacacaacctttggaggattcctccgtggccccagaaacattcaccgatggcctgccacttccaaagctgatcgctttcgacctggattacacactgtggccgttctgggttgacacacatgtcagtgcaccagtcaaggcacgcgacaacaactcgcgcgctgtagaccggtatgacgaatcccccgattgacattccatcctttaccactccccttgctaaccccgccttccttgtctcaaatagatggggagagtccttcgccttttatccggcagtctcatctatagtttacgcctgcaaacatcgctcgattccactggcccttgcatcccgaacccaggcccccgatctggcgcgcgacatgctcaaatccctgcatataatccccaccttctccgataaccccgccgcgaacgcgaagtctatccgtgctctcgactacttcgatttcatccagatctaccctgggaataagacatcgcatttctcgaggatccagcagacgagcagtgtggcttacgaggatatgttgttcttcgatgatgaggcgcggaaccggaacgtcgagacagagttaggtgtcacattttgcttggtgcgcgatgggatgaccagggacgaggttgaccggggcgttagagcttggaggaagcgcaatggtattaagaaggagaccgcagaggaaccataagggtccttgattgtcttgtccaatgattcctacattgggggatgttgtgctttagacttggttttcgattttagataccccggcttggaatatatgacggatgcatttctatggtatacagctacatgttaatttgaatagagtaacgttcaaaactgcctcaaattcatcgacaaaaatcgatagatccatccatgggtgccgttcaggggcgcctgggcgaagctgactaagtgacgcagcccaaaaagcggcgcgagttggctccaaaacaggaagacaatgcgatcatagatctcccaaaacacacctcctccaacacaaagatcaccagaatggcgaccctcaaacctccaacaaatacccaccgctcctcatccgcctcccacagctccggtccaccgaaagcccccttaaaagccgacccaacagcgacaatcgccgacaccgtcgtgttccaaggccgatacctcgtcaccatcggcgcagggacagtcgtccacccgcgtgcgaaattctacgcatacgaaggccccatatttgtcgacgacggctgcataatctgcgagaaagcggtcatcggcgctccgccaacctcatctcgttcgccgtcaccatctcgaccaccaagcacatcacccaccgagtctggggcgtccacgcccgagcctaggaaagagatatcgacgcggatctcatacttcgttactgtcggcccgttggcgactgtcgaacccggcgctcatgttcattcttctgctacgatcgaggctctggcaacgattcgccggggcgcggatatcggcgcgcactcgaaggtgtgttcaaggtgtgagattgccgctggtgggtccgtcgccgagtgggttgttgtatacggacagggcccgggaatgcggaggaagagagctcgtggtgtgaaggagatgagtccggctgttgtggccgcggcgcaggttgcgcagtcgcctcttcctggtcctgcgcctgcgggtaaggtcattgaggatgcgaggttgatggttctgcaaaaggagagggaggtacttgggagaatgcttattcctgctgctggggggaggaagaagtgattacaaggtctttttatttgagtttactatcttgtgtcaaagcagatttgtcttattggatacgttcatgtcttctagcagcttataccccagttttcgtttaaattgatcaatctatcgcgggtggttacaatgataatgcacgagataccttgcaactgaaccttagtatcaattgggagtaggaatagaaacccgtaggaacgccacacattcggtagatacagaacaaaagaaacaaaactgtcttttgcatagcaagttaaaacatgaaaagcaatgcgccataaggcataggcagacatagaaacctattcatgaacaggcccacgccgcatgtgtcaatcaaatcgagaatacattaatggatagaaaaacataaaacgagaatttctgcttaagaagagcctccaccacgaggctgcgggccaccaccgcctctctgtctcttgccgccgcttcctccctcgggggtagtgtcggggccgtcatcacgagagcgcttgttgccccctggaatgaactgacgagcagaggcgttcaggttgccacggttggcagtgggactctgagcctgggcagcggtattctgattttggttaccaccgcgaccttgtccgccacgaccaccacgacctcgctgaagaccggggccgcgctgattctgaccttggccttgctgctgttgttggtcatgttgttgatggccgaactgctggccactaccacgtccgccacgtccgcctcgtgcaataggaagtccagattgaagagctcgcatcagaccaggtgggtttccagcgggaggtttgctagggagagaagaggtctgctggttttgatcggtttgctgaacttggccaaacggattgacaggtgctgtgggctgtgccgcaccctgctgcgtggcagcatgttccgaggccgcagtgggaggtgcgatttgctccgttgggatattcggggctgctgttacaggggcggaggcaggaacaggagcaggggctgggcctggtgcagggaccgggtccgaggtggctgtaactgggacctgcggcgccgctagagtcggagcgggagcaacggtttgaactgaggttgcgcctggtacgggcggcttagcagctggaaccgcgaccggcgcaggccgcgcagtctttgcaatttcccatacttccacaacgggcttttgaggggtttccgcggcagccttcgataccacatcgatcttggcatttgcagttcggaatcttgtgtcaagcatgctgagacgggcagctgttttcttctcgacaagttcgaccgccgaggtgaccttctccttgatttcattctcatgtgccttgatcaaggcctccttttcgtcagccgacttctgtcgcaggccagccaatgcagcttcgttagcaccggaggcttgagcttcttgttgaagcttttgctgctcacgagcgaccccaccgcgaatgttgtttctgacgattgtgcgaatagtctcatgtttcgcgacgagctctcttgcttgagcatctgtcaactcgggaagagtaaatccagcaagctcaaacgtctttgatggtgttgcaggggttgcatccggggccccgccaggtgttccggcaccaggggttccaggtatagatcgttcaccggcggacagcttctcaatttcttgacgatgagcagccttggcttcgttcagtttagtgttgtacatatccttaaggcgatcagtgcgttctttgatcttcgcatcttgttcgctggcctgtgtcgccagaagtccatccttctcggcaagagccgcctcgagtcgctggatcttctgttcaagggcttgtatcttttgagcgtcacctggaccagggatctcgaccgttgcggttgggaattgcgaagctggggtagcattgacaggggtttcttctgcagcttcagctgcagctggagctggagcttgagcttgagccggagctggggctggggctggggctggggctggagtaggtgagacgttggctggcgcctccgcaaccttagccttcaattcctccaattccttctttgtagtctgaagttccgtttggatgacctctttctcctgcaataccacattgagctcatcttgcttggccttaacacgcgcgctgaggtctttagagcgtgccttaaattgctctgtgagcttggttcgcaaatcatgcgcacgttcatcggaatgctgcttaagctgctctgggaacgcagcgatttgagcctgaagcgactccatttgagtctggagagcttcccgctcggacacggcctcggtcttctcgttctcgaggttcgtgagcttctctttcagctcttgcatttcagtaggatcgacacggtcgtacttttgaaggatgttctgaatacgttgctggtatcggtcgcgatcggcctgtagaagctgcatttctccatccttggcttcactctggctctccaactcgtggatcctggtcttgaggggttcgatctcctggaccagctcattctcgcgggcgatcttttgatcacgcacggtctcggtttgttttaattggcttctgagagtggcgttgctctcacggaaaacgttgagctcattgacggtctccaacagcttgctgtggttcaatgcgttgtggtcgctgtcggccgcagcacggcgctgctgctcaagcttcagacgggtctcatcgagctgcgattgagtgtagtcgagttgctggttgagtcgcttgctttcctgggtcgaaaggtggtactgaacctcgacaatttctttctcgcgacgcaagaatttgataacctcctgtaggccctcgagattaggggctgcctggtctccctcttgctcatcatccgaaacattcattcggtcccgctgcaaggacgaaatctggctggtgatgttttcgagctgggagtgaagcacagaattttggtgaaggacctcctcccgacgcttctgtaattcagagagctcaccctcgtatgcggctcgttgctccgcccagctttcctccttctgagacaaatcggccttgtagccttcggatttggttcgcagctcagcgatgtcgagtctgagctggttgctctctgcacggacagcctgtaaattcttggctgcctccgcgtgcttaacgagctcggtctcgtagttctgctgggcatgcttagcgatttcggcctgcgcattcaggtcctcctggtgatactgcgcggcggtgacatgtcgttcattgtcggccttgagacgggtgatctccgactcgaagttagccttctgttcgtccagacggcgagtcgcctccgcttgctcttcacggagcttggtcatttcggtgttggaggcggacagttcagctgagatctcctcaatgcgagtctcgaggtcctgaatcttcgtgttcttctcctccacaagacgatcggtctcttcacgatattgatcatgtgtctcagtggcggactccagacgttcttcactggcttgactgatggcctggtagtcttcggccaattgcttagcgtgttctagctcacccttggccaattccaggtcccgtttcagttcggaaacttcaatcgaaagttcctgctcgcgagaaagaccgcttccttcaccagactccagtccctcggtagttccctcggtggtaccggctgacacgcttggtcgcgagttcatgacctgcagacgctcttcggcactcttgagctcgactgcaagctcatccacgcgggactgtaggtgatcccgggtggtcttggcagcaaccagctcttcgcggactgcgcccaggctggtgaccagatcatcaatccgtttttgtgatgtctcctgttcatactcccggcgcatgctagccttcttggattcttccatttcagcattgagcttgcgcttggtcgattgcagttcggtttcgagcgactcgacactggcttggagtcggcgtcggctttcggagtcggcgtgttcacgctcgttgagaatggtttggaggtttgcattcaatgagtctagacgaccacgttcattgcgcagattttcggtgtcgtcgatgagtcttttctcaatgttcttccaaaggtccttctcggccttcaggttggcattttctctctgaaggctctcaacgagacccttagcctccacaaggtcttcagcagcctgctgggtgcggagatcctgtcggttggcattttcgaagagagcagaatagcgcttctggatctcggtattctcattcttgagcatattgaagttactctgcaggagctctgcacgttgggaagcagcagcaagttggctgcttgaccgactgatgtcagacataagctcgctgttcttacgagacagctcgttgacctgctgccgcagtgctttgtgatctgtggtcgtttcttcgcggaaagtatcgaaatgagcttggacttttcggagcaactcggcgtagtcaggtcctggtgtttccatagccccctgaggcgctgcaccaagaggcatggattgcgagaagacagacgggtcttcgccggttggcttcctgtgcatgagcatactgcggaaagtgtcgcgctccttaacgtaactctgcatctgtgcgctgaggttcgcaatctcatcgcggtttgtctgcgcacggatccgcaactctttcaactcgtccatttccgctcgtcgcgtagcttccttggcttgcgcctcgtcgccctcctgcttgtcaccaagttctctcaacatacgtcgaagagtgtggttctgctcttggagctcgtgaagatccttgaaagtagtgaggtgcttgctgataaagcggccagtttcattgagatcctttgccgactcttcgacttcaccacgggcaattttctcgagctcctcgcggtcgtattcttcgccgtgttttgcgacagcaacctccaggacaagaaccttgacttcagcactcagatcgcggagttgttggcgcaaaatgtcaccctcgcgagccaagccctcgacttgaccctgccatttcctagcttccttgagagcggcatcccgttccttcccagccgcttcgaggagagtagacatttccacaacagcatggtcgagacgggtttgttctgctcgtccctcttcgatttctggtctggtcgaatcaagctcaagaaccatctcgtcaacggtattgcggagttcctggcaggttctctgctcagctgcaagagcggtacgcattctgtcgtactcggcgtacatctgcgtgacgttcataccacccttgccacgagatgcgcggggggagaacgagccggtgggagtgccagcgcgcatgatgctagatcgtagaggtgtactgggtgcacctccattaatagagacagcggggcttgctgatcttcctctagcaggttcagactcaagctgggcaacaagtgcctcgagctcgccaattcggcgctctgcagcactcttgtcgttggactccgtctcaagctccacacggaggcgtgagatttcctgcgctgcgtcatcctttgccttttcgagggcaagttggcattcttggacccgttgcttggccgtctgggcagcagatccttgtagctcagccagtcggttagagctgtcaagctcgacgcggaaggattcggttgcctggatcgcttcctctttcaactgatgaatgctagccagagaggtttcgtaccgctgctctgtttcgtctaggcgactcttgagcgagttctcactccgtcgaagagagtcaattgtcgagtttgcttcttcgttctctcgctgaagctccgagacccgagcacccttttctttgcggaacttgatgtattcagcggattttgtcttgagttcagtctcgaaccattcattgttctttttggtgagatccagttcttgttgaaggctctgttcgcggaagcgggcgctggcagatgccgcattggcactctggaggttttgctccgcggtggagagttcacgtcgtaattcgatggtcttcttgtgctgaagcgaaagctcctcggccagtttatcgtaggccgcggatttcgattccagcaagcttagtgtgtccctattcgatgcctctagggaagagatccgcgcctttaaagacgtcgtttctgattcatttgaagatgatgacgttttcaatgtagaaatctcactctcgagcgaggagcgcgtcgtttctattcagcgtcagagaagagcccatcagtaataaaagaaagatagaagtatataccggattcgtggagcttttgcctgaggtctgagacctcggcgtgtcccttttccacgctggctttcagaaccttgaccttcgactcattgcttcgcacagaattctcaagctccacctccaggcgaagcttgtccgacttcagctcgtcggattcttgagcctttttactgatcgatcgtaatagttgatcgaccagctcgacagttggggcctgccgtaaggtcgtgagcgacgattcggaaacgccatagtgagtcgagaggtagggaagttggatggcagtttcagccatcttgtcgaactaatggcagcacacagctgctggggcagagaaatgaaaaaaagtgagtatgggcggcgcaagctcgagctgggtcctcgaggacgggcgcggcgtgtactgttcagagacaactacacacagcgctggacgagggacctcaggtcatgacgatgtaaacgaaagagaggtgcttcttctgaaggggagagcgaggaattgaatgaaatggtaattgaaagaaatggtggagaggtgacttcaagggcgtccgagatccatttccgcgctttggggtgctgagctctggcacgtgacattctttgtctggccttcaatcttttaatagccactctactcgaagctttaactgactaggctgtccccatcctctattcaacactcttcgggtgtctcgtctacttctctttcagacggcactcatggtgcctatgctaagccccatttgaattctccagttcgatctcggtcaacccaagtggttgccatctcagctcagttccactcctctcttgaatctcagcgatctccggtccttcgtcgcatcatgtcgtaccttcagaatcaactcaaaagcttcaacgctagtgttgtggagtcggcaaaccgcatgcccacgcagcgacgtgtggccagtaaccaaccggtctctggcagcagttcccaggtcccatcgtccgccccaaccccgtcatcctctagcgatatcaaaaagaagcgccatgacccggatatcgtctactcccagccggccaacacaggcacgggcaaagatattatgacgcaagtgctgtttgcgatcgagcacatgaagaacaagaacattccgctcaaattctcggatatcatttcgtacctctccctccagcaccgcgcccatgaccaaggctacgtgcaggctcttcggagtattcttcagatgcacgagaaggtcgagtttgacccgagcggcgcgaacggggaaggcacattcaggttccgccctcctcacaacattcgcaactcggagcaactcctgaaatacctccaagcacaaactactgcggcgggtatgagtgttcgcgaactcagggagggctggccgaacgtcgaagaggaaatcaacagaatggagaaggaaggcaaactacttgtgactcgaaacaagaaagatgaccatcccaagatggtgtggcccaacgacccgtccctaattgaacactttgacgacgagttcaagcagatctgggataagatcaaagttcccgatgtcaaagtagtgaaggaggaattggacaagttcggcatcacccccaccaacaagaacaaggtgcttggtccccgggtcattgcaccatccaaaaaggccaagaagccacgccgaagtggcaagaccaccaacactcacatgacgagcattctcagggactactcgcatcttaaacggtaagtgagtggttcaagggtgccgcaacggtctcacttggcttgttgcgacaccagaagtcgctttgatacgaaccatcgatttgcattgctttggcgtttgggaaatacgtgcggcctcattgttgccgcatggaaattgattcattattcttacatctgcttcgacagcattgacatttgtatgtacactacacgcagaaaacgatagatacccaagtaaacaaactaaatcaattccttgctaccctacacagctacctatataccaatatttctccacgtagtcagccagtccaccatctctacgctcatactcctacccatcgaagacacaagccctggagtctatccatatgcatccattcatctaaaaaaaaaggtatccaagagaaggcgtagtgatgtacaaggtacccaaaagcacacgacccagaagcgaacagtatataacaaccaaatgatcaaatgcaagcccagcgatcaatacttcccattcgcagcagcgccggtaccctcaacacgatccaaatatgccaccaaatcctcaatagtacacaccttaattccccacttctttccaaagcgcaaacacccatcccgacgcatcataccattattccccccaatctccggcttgccctcaacaatctccccgtcctcaacaagctcagcaataacaccagccggcgccttaccagcaagcttacagaaatccaccgcagcctcggtgtggcccgttcgctcgcgcacgccgccaggccgcgcctgcagcgggatgatatggccgggccggcggaaggagtcgatctgcgccgttggagaggcgagcgtgcggcatgtcagtgcgcgatcctcggcggatattcccgttgtcacggagtcgtcgctcgagtcgattgtgaccgtgtatgccgtgcacttcgggtcggcgttctcggtaaccatttgtgggagcgctaggcgggtggcgagatccggggtaatgggggcgcatattaaaccgctgtgttttggaattgttagcaatgtttgcagagatgggattgggattggcgcattcgtctttgtgggtgtgcggttgcggggagggacgggggtttgcggcttttgtagtcgtttaccccgtcgctgtcttgggtcgcgctcttaccttgtatagcgcaccaggaaggccatctgggcggctgtaatggactcggcggcaatgattaggtcgccttcgttctcgcggtcttgcgaatcgaggacaattatgaattcgccattctctgttggaggtcttggttagcccatgggttgggtcacaaggcaccgcaagcagctaatgcttgtagtggtgaagtcggtcctctgtgtgagaagattacttactaaatgctgcaattgtatcctcaattgagtcgaattggtgcgcgacttctgtgggcgaaggcattttggattcttttttgcccctcactggggaatttcaaaggatgagtagtttagagtgcacgggggcgtaggggatacgagtggaaagatgatgaacaattaaacaagaagaataattgagattacttcaaaccaggaaacaaaaagaatattggagactgagtcactgatgacaagatcattagaaatgcttgtgacatcgcgggggagccggaccgggcgagattgctaagcctcggaagactgaaggggggccaacctgggaactcttcacctccgaggtctactaattccgagttgcttctcaaatagtatactctataggctattacccagatgtaggcacatatttacgtttctaacacaccccactagaactgggtatctcgatgcaatagttataaactgtatcagccaagcccccgactccccatccagcggacctcatccgcctgcctctcaagcgcacggcgcatataatctccatacctctgttctctttcccaatcatcacgccgtctatgtcgcatctcttcgcgtgtagcttcatcaacctccgcatgcataaacacatcatcatcttcttcgacttctttatcatccacctccgtctcataatccgcaggaatggaaaacttgatacgaccaatgcgctctccagtccagatcaagagttcatctccagtgagattcccaccagtggggagaatcttgcgggctacctcattattgccgggcgattgggaaggtcaaagcccacgcggctggtcttcttctgtctgcgaggtggaccgttgactacgacgaccgaatgggatctgaggctgggaggtattgatattccaccgtcggacttctgaccgaccgtttcgctcggtccacttgatgttcccttcggcgtcggaaaacacgatgcgattcccgtgcgatcccacggaaagtagtttggaactcgcggcgctttggcggttcttgtgttctgggctgagagtggatgtcatgttcgcgggcctgtggtcgtcttcgggtgctggtttgatatcatagagttctagcgagcctcgtccgttatagtctccgcatgccacgaccgaatgtgactcggggtaggtggagcctgagaagatcgggaaccgaggcgctggcactgaggcaagaccacatagtcggccgccggaatggacagtcgtctgtagtcgagggaagtagcggcggtcgtagcacaggatgctggggaaacgccctgcaaggagaattgtattcacgtgaggagctggtggatgcaggatggaaagaggaccaggttggaagaggggtgcatagttggctcctttatctgagggttctggactgcgtatacgagtaggtggctgtccattggattggagttggaacaagggcgaatcagattgagcaaagatgcccagttcggggacgtgcgaactggcaatctgctcgcatcgcgagctgattgcctcttcttcctcgacggccgacagtctggagtcatagatctgcagactgagcgtagtggctagtgtcaatggcactgagtaatctgtctcctgggaaagagcgaaaatcgaccagggatagcgctgctgggagatcactctcagtgtctccaggtcaacttcattaagaacattcccaactgccaggtaggctctttgtcgcagggaatccacgctcactccctcacctagatttataaattccaacgaagtcttggatggggactgatcccgacgaccagacaggttggtcatgaggatgccgggctcactgaccccaaggatcttgcctttacttgcttgggagttagccgagtgggagtgattcaggtcccagatgcagacgctgccatcttcaagcggggcgacgatcttgttctgcctggctgaactccagtctttgagcagtcccatgcctttgacctcataagactgccctcgcttcccttcacccttgcggatcaagggctgttcgacccatgataaagatatgggcccgtggcgagcaatatactccgaataccagtccacatgctccccctcagccgacgagtcccattccgcagccgccctcgccctctcactccaagataattccccggtatcatcagagtcaccattcactggcggaacagaaggccggataatatcgctcagcgactcctgccctagggcggacaatgaaacagtcgcgtcggaaatcagactctccgagggtcgggcagcggagcgggcagcctgccgagcagcccatgactgctcataacagtgcaatctccattgattattatcacgggcaagagcaaagaactttttcgatatggattggagttggaccttttctcgtggagaaaggtctgcagagctatcagttctgggtcgaaactggtgcggggaagatccggggcttacagtcgatgattttggacagaatctctaccggcagcttatccatggagaggaatccgccgcattggggtagtcttgaggagggaaatcagctacgggggatatcggtctcttgaacaaaattctagactctttttctgtcggtttttccccgcgatctgcgctccagaccgtcacgtggatttaattggcatgagacgaaggaccgggctagatgcaaagctgatcaagggtatatgcaagtataaaaatggtgttttattgagtgatgggcttgtgacgtttggcactctcgagataacctcagatcggacacggcaggctcgggagacttttccggtttggggggttcaccggcttttatagaattagaaggagagaacattctgatatattctacagcacagccacccctacatgggagctgaactaaatatacgtggacggcattgccttatagggcctcgtgcttggtatcacatgttatatatatataatcaaccttgggaaggtttacgcatcttacattgcctctagcactgatacgggaaaaaacagacatacagaagcgtctatttttgaaactacatgctatatgcattttagaaatagaaaatatttgagtgagatgaggtgttcatttcacacagccaaactccagcccagcccaatttcccccaccgtcaatcaatcatgagtcgtacattcgaaaataaattatgtaggcaaaagcataaacaaagtagatggtaatccacagaggacacaggggggacctctattcatccggcctaaagaccgcgtctttgcagaggatagccacctttttaaagaaacgtcgccattcaagcggatcacctttgatcttgacgaattccacttcaaataacccctcggagacacactcaatgagcactttaccctggagtggacacatcctgccatccttggcaatcacccgaatcatggcagaagtatctccagcaccaacagcagggacactcggaactggaacccccagtcggtgaaatgcctcacagatgagaggcacgagaagcttgagctcccatgctgaatagaaacgcgtcaatgaacgcgaggggataatatcttggaacttctgtgcattctgagttcgactcacaggaaccgaaggctgctgtgagaactgtgacatagaaggttcatcctcgagatggcccgcgatagctgcatcctgagaggcaaacttcttttcaaagggctgggtcgaagaaaacaaatcggcattctgtggactgtcccagtccatcaacatgccacctcccaacatctctggctgtgtcgaggataagcctgcatttgcaccaccgtcatcaccatccatgtccatgggatcaaagctgcgactcgaccccttcccagattgggaaagaggatcctggctgaagtcgatatgaagcgattcaaacatcgaggtggccagattaattggatctctcaacttgccctcggtggagaggtatttgtttgcacgagtgtaccaaggatgccttcggacatcctctagcgagaatcgcttttcggggtccaccgtcaacatgccacgcaatagcgataacgtagcgggtggtaacttctgccagagctcatcggtagtccgggagttcgtctcaacatattcgtggtactcaaagctatcgtctgttgggctatcccacggtgtgttaccggccaacaggacgaaaaggacgatgccacaagaccaaatgtcgactaggtccggatgatacccagctcctttgttctgacctcgagtactgctgctaattacctccggtgcaatatatgggggactgccacagaatgtggttgagagtttccgcgtgcccttgtactcgaacagcgctgccagaccgaagtcggcgatcttgagatttccgtcgccagtcaggagcatgttctcgggcttgatatcacgatgaccgacgcctttggagtgcataaagctcacagcactgacaagctgcgagaaatagacatgagcaatatcctcgcccacaccctcgtcggcctcgatcttatcgaaaagatccccgccttcggccaactccattgcgatccaacgccagacgtcatcctcgccagtctgatagaagctgataatattcccatggcccgagacatgtctgtgtaccgtgacttcgagttgtaattgtcttgcgctgatcttcccatgtcgcgcggcgtaatctttgtggatgtacttgacggcgaagacagggttgtctgaatctaacgggcaggcttttttgatgctagataaaccaaacagagtcagatctggatactctatgttgtgggtcttgtacttaccatgcgtaggcaccttggccgatggtcttggacacgatgcgaaacggcacattgttcggcagcggggccagctgcgaatgctgcatttcgataaagctcaccaaaatccagtgaatgcgattgaatgtacagggtaacgggtagatacacgaagggacaggaaatgaattatggttaagaaggcataacgagagggaaacaagataggctgagatgtcgcgtcgaagcaagggtagcgaaacgcgggacaagacgcggaccactttatcctgatcgggtagtgtgttgacacaggcgcaatacaaagcagaaggtgatgaagggaatagcttcattctgtacgtatgatatggattacgactactatagtatatatgcaagtatactaatctccgatattatactatacatgtgctattaataccttaactgcagacccgcagttgatttctcgatcgccctaaatttaccagatcgactattttattacgtttcgaattgtatttgtttctcttattcagttaaacatgatttcaaagatgtacaaaatatgtgtgcaagtataaacagagatccatttcctttgacagccctggaggtaaattgacctaagcggggttcgcgttgcccggggcgtctaagggccgagtaaacaaatcttctattttcttctttgttcactttgttcactttgctcactttgctcacttcacgtaaatcctccattctcacaattcatccctcctttctaaattttcgttgcatcaagtcctccgtgggtcattgttacggatccggcgtcattccaacccctcgtgctactgttactagcattccacaaccgggaatccgcagatttcttactattccttaagaacctcgattgccttacttcccgatccacaatggactacagcatggaagacacgcagaactcggcgcccgacgcgcagcaagctagcaagctgaactcctcgggtcaaaaaagcgacacccagagtgtgaccaaacggttcgtccccctcagcaccctacaaacagctctacttgtgagtttgatttggtattacatataactgacccgacctctttgatccgtatagcctgcaggccgagctcatgcaactcatgctctcaccctcgcccggtatttccgccttcccggacgcagacggcaacctcctctcgtggacagcgaccatcaccggtccgaccgagactccctacgagggcctcacactgaaactctccttcgcattccccaacaactacccatactctccccccacagtcttgttcaagactccgatctaccaccccaacgtcgacttctccggccgcatctgcctcgacatcctcaaggacaagtggagcgccgtctacaacgtgtcgagtgttctgctcagcttgcaaagcttgctgggtgagcctaacaagtaagcgtctgctcacatcctctataacttctatcatcgctaacattgacccagtgcgagccccttgaacgcccaagcagctgagctttgggactcggaccaggcggaatttaagcgtcacgtcctcgcccggcaccaagacctggacgatgaatagagcgttggatttgatatattttccatttcattctgcatcggcgtcggttggccctgtcgcgtacttgcggtgggatcgtgctgcaaatgcataacgggcctggtttgggcctgggagtttctgggttgcttgattatgccattttctatctttgttcctattgttactagttcctccgaaccttcgcattcaggtaccggcgtgagaaactcttgctcttgagatcctcgggcggttgtctcgtttcatttcttccggtcattgctcctagggcggtagatatattcatcgtcggtgtcattgtagatcaatttggtcttatacactctacttccaagattttatgtgtgtctaggattctccgcacaagtaaagaagactcgcctgtctagacttcgtcacggtaagtcccgcagaggtccacgggtatagaggtaggttagtcctacatcatataaaggacaaagtcctacttatgcagccgactattctacacccgtgcctctactccccccatagtaagaaataagaatatgtgaaaattatgctcgattctgccgataattccaaagtcgacgctatcaagattggacaaacccatgaatgggtatcaataaatgctcaagtaaccgtatgaaatcaaaaaaccacccagattaagatacaggtcgtacctaactggaggaaccaaagtactgtttctcattggtaatcaacaagccggcaaccgccgcactggtgaaagtactaatggcaccagtaaccatagcgctgaatgcaacacgcgacacatcgctagctcgaccgggcgcgatctgtgacagaacaccgatctggttacccagggagccgatattagcgaatccacagagcgcgtacgtaacaatgagacgagagcggtcggagaggtccttgtagtcgtcccagtgttgaagacggtcataggcaacaaattcgttctgtggctggttaggagatggaaatgaccatttatgaagatggggaacttacagtaaccagcttaagaccaatcagctggccaaccttgaggaggtcaccgtcacgggagacaccgagcaggaaggcaatcgggtagcagatgtatccgacgatcaactcgagagtcagaggggggtcgttgatgctcaggtatcggccccaccaagtgaggaggccgttgattagaccgacgagggcgatgatgcacagaaggatcgacgacatcatggccgcaattttcagaccgagccaggtgccgccggtgaatgcgtggagggcattggcggcgcggtgttcctcgtcatcggggatgacgacacgacctgcagtgagggtttcttcctcttcgggccaacggattttcgagaccgccagtgaagcggggatactcatgacgcaggcgctgaccagtgcctgtgcgctgacaccgatgctgatataggcgatcaggacacttccggcgatggtggcgaagccggagcacatgatttggtgcacctcggccgtggtgaggtgggcgataaaggggcggatcagcatggctgattcgccctggccgatgaatggggatgcggcagcgacaacggcctcggcgccggaaacgcgcatgctccagaagaagaagacggcgaatttaccaatgaaccactgcaggacattgtagtagtacaatagttggacgaaggagacgaagaagatgatggcggagacgacgttgacgatgaagaaactcgatgggacaaaggctgtattataggcgtagaaatcctcgctggtcaggaagatgactccttcggaagcaaaaccaagcagttctctggctagcgttgagatgaagttgaagatgtcgtatcctgcagtagtgcgcagcacaaacagagcaacgatgaattgcgccagcatgccgacaatgacagtgtgccagacgatcttcttgcggtttcgagatgtgagccatagcccgaagatgaagactaccattccgaacagactgactgcacggttggcacgtgtgttatccattgattcttcggacacgaacgagccaataagaataacaccgatacatagcgcggcggcactggctgttctcagcttctcgggaatcaggcgcacgaacgggagcgcagtatgatcccaaacccagtgcatgggctttgacacgatactaatgggaacatagaagaatagtatccgcagcgtgatggcaagatagagcaggaatgggatgagccatcctatatcatgtcggtgtagtatcaggccagcaatccaccagctaggtgaagagtatgtgtaagccccgagttgagtcgatggtgtacagtaccactgtaaaatcccagtagaatcaaagtagttcactcacccggtaaacacaagccagaccacagcatggactatatgcctctgttgcttttgcacgcggcgataccaggtgcgcttggctggtaagttctctccggcttcttcgtcgttggagtttttgctgccgttgtccatcggtgtttgttcaggcacaattcctttctcgaattcggcatctttagagtagaccacttcatcttgacgtccctctgtggcataggctgtatggtgttgatggggatggtgatgttgattctctggatccagcaccggatctgcatgatgcacaacatgcgatcccgtaggatcagcttcctgggtcttatccatcacgattccccgatcgcaaactcgaaggttggggaagtaggaaaagtacgtgacaaatttacaattaagcgtgaaactcaaaaaataccgtgaaaattagaccgcctgagacccatgggttcctcacttgcgaggaaaatttcgacttttttaaaataaaatgggcagaggattaattatgggtctcccattggttttattttatttttattttttattgcatacatattatatttcctggggattgagagataaagaacgcccaaggtttggcacaagacactaaccatcggaccttcttcccttcctatcctgtttggctggaagaatgccagtgaacggattgaccgacggtgtacagcggagatcccgtctcgccgagagccaacaaaccacttgcagctacatgtaaccacattcacggcaaaaatgataagacaaggtaacattatctcgccacagcaacccctgccgtctgcattgattggtggcgtagtttaggctaactttttctcaagtccttggaaagtctctccgcacgggtagttgtggagtataatgggtcgtgtgcttaattttcccgaggtctttccgccgagtcgactagctgggagtgagatttctccagtttctcaattggggcgcaatacccgagcgtttggatatggaattagaggctgaacgtgaagagacacatatgttgtacgatgaaaacaaactacaatgtgtgcgacctgcattgtgggttgttcctcggttccaccgatgtctgaatttgcctcatggcagagttccaaggttggtttagcgtggaaaaaaatggagaccggtgcgaaaaaaaattcgataagcagtgaaaggtccgagatacacacgtgtggccctcagagataataaattctccttttgcaagaaataggcgcttcacaagtcacatcgtggcgttctaggttacggaacaacgtgttatctagaaggaattaggccattttgtgattgttatctctgcgcgcgtgacctcggaagccctccgaggtagactggagccctgcccgagtgccgatatttacgtaaacacatgactggccggaggacccacagaactgaggtaggtatatcaaccatggaacgggaatggcacatcctcggtcagccggtaaacatagatctatgaggtcttccagcccacatatggagtacaagggagacagctaagactgacgtatatgaagactatctctggagatcatctcagccacttggtccagtccccacagttgagccccaaacaccacagcactatatgttctgaagactttagggttgtcggcaactgatataccggccagtaaaagcaacggatgagcaacttaactgtagccaatcactcaaagggtacccccagaaaagagctactgatcgtgcctacagagggataaatgaagcttgtcacctatagcggacgagggttaaagggacccatttctgactgctgtgtttatgatatccggccatcatattatctcaatttagctcgactcttgaccgatttctactgttgcgaatacactcccgccatctaacgagcatgcggagtgcatatgccaattcattttcttaaaggagatgtcttctggctatattgaggggatttactatggaaaatggaagaatatttggcaatattaccaaagcttggattttccgaacacgcttctctgattcgccttgagaggcctactgtagaaagcacgtgagtggacacagtcgcactctgactggacaatattgatgtagcggagttcaacagtggtcacctcactggcgaggcatggacaatatcctcattgacttccgtgggatgtcgtaaaacgaggatctctagaacgcggggttcttgtctttccgaagagccctggttgtcgtgctctgagagtcaagtcgagattgaccttcgatctgatacagtccaggtggcgttggaattttggcgagttcatcaaactcgtccaggtcaggggaacaatgaagaagtgaaaaaagaatttggaaaggaaacaaagtatgcgaatgaaacaaggatgggaatgaaagaaagaaagatgaatgtgaaagaaacgtgaaaatcaaagaagaattagagagaatatccactgagaagcagagcatcaaaagcaatcgagtcctgaccagcagagtatccggaaggtacttcggttctatcggggctttgagaacatctgatgcaatctcacggccgtgacgaaatcgcggtagacctggcccatcaagtcagggtcttcttcgttgatcgtgaggttgaggataaagaaacgacacctaggattgccgacaactgccctcttaaagtggcagagctcttgcaagggggccatgtcgccgacaaaagcagtgtagttcccaagaacattcttaaaacgcgccacaaaggtgtgaggatctccccttttgtagcggaggttgacaagcttcttaaaccggaggtaggtggcatggcgcgacggattccagtgaagatctctcagttgcaagataagccacgcgaacattgataatatcataaagtgaggaggagatgtgcggttcgagcgtagatacaaattgtaggaaagctcggttgttagccttttcccacttctctagccctttcccacttctcttcgccatcaccgcggtgcttgcgtagctccaaatttgaagcgacaatttggatggagcgagcttcaatagcctctgcagtaatgtgagtttgcttttctttgttgccctcagcctctttgaaaagcagggctcggacactgctacgagatggatctgcgtagatgggagccgggggggggggggcatcttgatctcatctctaatcaactgcacatagacaggattgttgaaacgaagcatcatgaacatctgagtttcccacatcctccagttggaggcacccttcagcttgggaactgactttgccaggtcgatctcgtccttgcggacttcgaagtcgaaaatggtgttttcgttggaagatgtcgacatagtggcggctggaacaggcaaagccgcgtaacaaggtttatgagttgtagataacagagagatggtgtcgtgacacgatctggaatgtctgtatcttgagtgcagatctcgcgttgcgcagataattgcgtggttttgtgacagacgtggagtgaaggaagctcggtgtgaaaaagagggtgccagagacgcaaatatccagatcagtatcgaagttgtcagtagagctcggctcagtagttgggctcatatgcacacatcaatcggcgtgaccgacgaggtgacggaccagcaatcgatgatctcacggcgtgatgcttcaccgcaaaataagcttcgaaggggtggtggttaaaggaagtagattgcaagcaaggtcatcacaatttgaagaaatgcagtggagagagaaggcagataggacaaggctatctggatgggtggtttaaggaagaagaccgagaaatgagcgaacttggagatatccgaagtagagaacaaacagtaggaccagattgctaaatactttcaacacatctaacagagagagtacattgagtttatctggagctctgaatatcttacttcgcttgaagagtgaacatcctccattttgggctccctaagagccctgtgtgcgggctcgaatgccctgcatgctaaaatatcataccgaccaactcgcaagcggtggagcaactaaatgacaatgtacctaggtatagtcagcgccattacatattgttgggtaggctggcttccatagctctccttcgctccattgcgggtcaccaatagcacaaagttactcaaatccttcaatctacccaagcttcgttcgattggtttcaaagtctgtgcaaacaagctaactatattgctccgcagaaacggctactggcggaacatcttcccagaacgcgtgcccccctgcaattgtcatatagattgcataaaaataatcgaaagtgtgataaagttattgattcgccaggctatccaccggccatcatctccgcaggtcgctctattaagctccaaaaaccccctataaacttgtcgcattttggggatagccatacggaccagtcatcaatgcatgagccatatgagaaccctatcaatcgatggcaaccagaactctctccatcccccgggccgatatctctctggacaagttacattttccacatgctatcctctatatccccgaattcctgtaaatcgactccagcagatttaagatcttttaaccatttccgaagtgcttcacttggagtcgacattgacatttagatatatcaagccagtcaatatatccctctaaaaatgcaagcaatagcgtctgctggtcaacaatattgttcaaatccacaccagcttgtaagacccccataaaaagctcgttccacgatttgtagagatcatagtatccttatctcatattaatgtaaagcgacggcccgcgccttcgactttgatggcgtacttgctttttccacggatgagacccttgtagggcagccttggttgctccaatcttcctcacgacacaatgtacaagtgttgtgttctttgaatcaaatccccacggcccttctacttggaggtctttggatgtcaatagatctggccccagcatagtttggattaagtcaggcaagggcgaatttaccgagatatcaagactcttgctaccgtcgacgagcttaggcggaatcctgcctttagaatatccgttattcagaagcgaaagatcaatctgtctgtgattaacgcctagctgcagaccgccgtgaactaggtgaactcgtgattgaatctctgagttcccttgattatttgctctgtgaatggcctaccaaataatttgctgtaattaagcgggtgttcttatttgacaagctcggagaggacgaggagccgaagtaggagttttactaaccgctcgctaatataggtgcttccgtttaccgaggtacctactaagcaattaagccaactccgcatggtctgatcctcaacgttgacgtcgctcactgtgtgctcttttctcgtatcagtcttatgggctatatgatgaatgtggatgggtggaacgataagtcaaccctggtcaggaatcttcaatcaagtcgcgacgaatatggcggcacgaaggaatcgagtattttgcacaggtgaacaagacgattcagggtcttcgagtggcacccaactacgagggttgccctttcaagatgaagacattccgttgtgccattcgataatgtggtcgcctcacttttgatattgctctctattgcttggagcatcagccaaacttgacccttgatctttaccctctataggcacctaccgtgctggtgagcattcggcttgaattttgctgtgtttttcatgtcctgcactagtagtttctcggcaattagatcaggttggacccgtagaagcgctctatttatattagcaggtgagataattacaacaccggagattacaaaccttgtatagcactgctgggacagtgacagcaattgaatcgcgtttcgcagccgggccatatgccgttctagtttccctctctgcattaccacttttgcggcagcataagattttcgtaggcgactggaggagttcatgtcactggcgagctcattcgtcagtgcttgtaggctcgtggcagcttctctgctaaattccagactttgcatggcatgtttattccccgttagggcgaatgcgaaagcctcttgtaatacgtcttcctctatttccgcggggaccagtccaaacagttcaaaatcctttaggagatatttgaggtcactggatgcatcaccaaactggctccagcaatccttgatcgtgattatagattccgtgacctggacgacaacggttgcgaacgtgatgacgctcgaaaccacaccaaccacttccgccattgcgataacgaagcagatcagccagatacaaaaaggcaagttcggaatctgatcgagttcttatcaatatcgaaggtgaatgccgtgtgttgctgcgcctcatgcacccctccttgtttggagcctcactgggaatacgctaatcaagtactatttccagtaacatcatattcaacacagctcttatttgtttatttcaagagatagcggacctaacgggcttagataaaagtggagtatcgtaaagccaagaagtaaacgaaatatctggatggaacgtactatagcgtgcttctaaattgaataaataaaacagatgtaggaatcaaactgtgcagacgaacaaggcacaacaaccaggttggggggtgatgggcgatgaaccttctcgaggttcacattggccctttagaacaccatgcccttgacctgagcaaccttcttcaggtcgatgttcttgatcatgatagtccacgcaaacgctaggaccatcacacccaatccagcagaaagcatcctaacttgcgtgtagccgtacgctttctggatggccgctctcatctgagtaccgggagcgtagctcaactgcgtctcgagatcttcgtaaatcatcgccaaatctgtcaagtctggcagataccatgtgagggccttcttgtatgtgttgttccaaattgccatagagatagtaagacctgccgaatctccgattgtcccgaccacattgagcaaggcaagggccgtagcgacatgctggtgatcaacagcagcgaggatagacagctgctggacgatgatgaaaatcgatccgccaattgagatgaagatttgacacataacctggtaaccgacactctggccgggacggcggaagtatatcatcaaaccctgggcaaagatatatagaggaacagaaatataaagaagccacttgaagcgaccagtctttcggatcgcccatccaacgaagaacaaaagtataccagaaactacatcaaatgtattggtgatatacccagcttcagcaatagtgagatcattaaccacttgaaggaagttcgagaagtagttgttccagcaatagtttgaaagctggtacgtggcatccaagagacatgcaccgacgacggttcggttggtgaggaaagagtaggggagtaaaggcgtgggggcgatgtacctctcgtagaaagcaaagaagaagagcatggagaatccaacgacaatcatagctataatataatctgtgccccagccgttaggagcctcgctagcaatgtcaaatgggagttcaaataggacaagtcccgcagtgaagatgaagactccgattactgtatggaacattagttttctgtataagaatcaattggtagtttgaaatactcacaatcgaactcgagtgtccaaaaccagacactttcaaagaacgatcgtccgctgttctctctgataaccacagcatttccctttttggcttttgtcagattgaacttcaggacgaagaacaacggagcagccacgatagggaaaatgatggcgaaagtaccataagcccatctccagccagtatgagcgtagaatagattcgccacctttggtccagcaaaggccgtaataatgtatggagaagacgtgaaagcgtatgcaagagctcggtttctcaactgcgagagatcggcggtgataacatccacagcgaattgcatgcctccaaagccgatgtagtagaacacctgcattccctattagcgtctgctctataattcatggatattcccgagatcgcttacattagcggcacaatagacagggaaactattgcaagaggccataagaacgaggcctacggtggcgcaaatggacattaccaggaacccttcggctcgaccccaagtgtccatcatcttggccactggaaggaagacggcagcggagaaagcatccgcaatagcggtaggaagaccagataaggagtgttgttgaaaagagctagccacataagtgctcaagctgccatcaattgacgatatccaggcgtacgtgaagtaaaggaaccacatactattgaagtgtaagactagagatggaacagaagagggggtaaattgacttacttgatgaaaacgaagatcaaggagactttcgaccaggtctgagttacggcctcaacttcctggataccatgttgaagctcttcatagggcacacctggtaactcggcaccattgtttggaagtgtgtcctcgggatgggtgattggcccatctgtcttctctgcctctaccgtgttcctgtcgatgtctaccgaagaacttgcagcctcgtcactgtcgagcttcattcgatgaaagaccgaccgggccctttgcatcaacggacgaagcgtcatgacgatagatataaacacgaacttacaaggactcaaacaggttgaagggtcccaaaagtattttggacccggaggagaaggcaagtaaaatataagataaaacgtgcggaatttccacataaaacaccgaagtcggcacattggctagcgatgttttgaacgatcatatgtgggccaaacagacaatcctttccccctatatcaacagtgttacaacacgcgcggtatacatctaaagtagtccaaacatattcgttcaggccgtgggccctaaccccactgggcccagggacaaggcgtcagcgtgtgacaagatctaatcagatcgccggtggcttaaagatcattaccacatccagttaccctcattgagactccacactgggtccattcgcttccgacgttgattcaagcttcatgtggatgcttggaaatttattatggaaccttggcattatgggccaacaatgctttcttcagcagtcggaaaacgcgcattgaaatcaaatcatggaaaaattatcagatttgccaagctttcggacttgattatttctattatccacattgcgaaggtttcaatgttgataccatactacatgtgccactttacgtactgtattattactgctatctgtagagactataaccgattccatgccggtccctagagtctagcatctggctttgaagccctttgcttcttttcctgcgcctaaataatcgagtataatgcagtaagtaactgaccatagagcagacgctaacgtggctaatctaagaggaggaatgacttcgatgtctgggtggaacaaaatagatagacccaattaggagttagaatgctatcgaatgtctattctaacatctccttctaggaagaagcgcacctcgacgggcgacattgtcgattccagttaccactacattacgaaccgggattatcatccaattcacaccttcaatctgacgttgcgaacccctcgtatatgtaatcgtgtggcctaggcaagttgtgtttattgatgctacgagaccagactattctcgatgtgtgcgaatgcctgaagtagacaatgccccccgtggacgcgaacaagcatgactaaacgtaacatgcgcacttccaaggtttcgtatccgtactagtggtcacatgttatgccgggtattgttgtatagctaaaacccatgcgactttctgtctgacgtcactgtctttaaaaacaagctgtctcgacacctacaaaacaaaaaccgggaaaaaaaaagaaactccttgcttgaatcatgtctctacatctcgtcacacaatgggcaacacacgtcgggagtcagctttgaccaagtccatccagtctggcttgctacgcgaaccagacaagtgcaagaagacagcctggcgtcgatttcttgctttcttcactgtgcgacgaattagactcgttcgatatgagctggaattatttgtacggctacgaaaggagatctggaagtttgatgaagatgaatataaggcgagcttccgcacgagcgcccagccccctctgaaaatgatcggggacatgggatactctggttctgtgagtggtcctcgttacaactgcaaagacataatactcactaactgttcttgatggtagacattcttcagcagtctcgatggccacttcgtcatcaagagcctcccccgtcgtttcgagcatacctttttccaggcagacctcctcgagccatactattattacatgcgagaccacccagactcggtcttggtatggatcacggactatgtcctctctccctatgtgactcttggtactctctttggatgcacgccagcccaccatattgtcatggagaacatcctactcggcaaagacgaggaccccaacggcggacagtgggaaacctacgatctcaagcccatcgactacttctatcccgagcgtgatcttatccccgaacctcttgttagcgaagaaacgctgaacaaactggcggataccttcaacgacaagctccatctgtggaaaaaggactatgacgcctttatgcaatctttggaagccgatacaaagttcttgggagaagctaacgccgttgactactctctgttcctggtcagaatgccagcttcttcaaaacccgctattctagggcgacacagtccctggagagaaggtctcccgtctgctgatggaaagtggaagtatcgggctgtgatcctcgattttttctgggcgcgccacaaattccacgcacaagcattgtccggggccgtgcaaacgttcaatgttgtgggtcgcaaaggtccaatgtctattacgacgacggctggtgagtaccgtgagaagtttctgacgatggttagggaaatgattcaagttcaacaatgatatcctacgcggcaacttgttcttgacgtgttcagcatatacttccaatttgtacgtaaatgcgatgtgatattttcaaagctttacttcgtcttctcaaattttccttatcatgcccatcggtgagatctgggagactggacataagcaccgatgaatgcttcagtccaacaaaggtggtaagtaagatatcccagggagccttcgactacttttggggtggtttataagcttctatgtatataaaaatgaggctttttctcctatacaaatgtatgtatctccattttaaggtggtttgatttcggcccggaataactgaggccggtggtctacattaaaacttgcgatcctaagcgtggatgataaaggcaaaataagggcttagccgtagtttgcgacggaaaagtaatagggggctaatggggcaatcagcgagctcgggcgggccaaattgtaggcgcgcagcgataagtgtaaaatggtgtggataaccagaagacgcaaacggataaggcggggagcgtaactttcccctcccgataatctggtccactcgactcgataatcatttttgaatcacttcaaatcatggcaaatacagagaatgaatgggaattggaggaggggattcctcaggttggggatcccttcatccaacaatatttgaaaggacgcgatgctttaattatggaagagcgaaagcgacgtcatggtattccccacttgaattaagtacgaaaatcccatctctaactttctttcgtagatgcaaatctgcgcaaatcactatcacctatcgctgcccgcgcaacaaagatagtgtcgcagatccgagctcaggaacagaatgagctatggtcaagtggattggacgaagttgcggcccaccaggcggatgagatcctctaccccggtgtcatgtttaacctcgccaaaggccgcatggagaacaccaaactatggaaaatcgtggagaagatgccaaaggggtcccttctacatgctcacatggacgccatgttcgacatcaacttcctaattgaccaggcattctccacgcccggcatacacatgttagcgccgaagccgttgatcacagcccatgattacgaaaacgcgcccgtgctttttcagtattcttcgcagcctttagaagcatcgcaggacaagccaagcatttggtcggagacatacgagccctcgtcgttgatctcgatccagaaggccgcctcgtctttccccaaggggggagagaagggtttccgggaatggttgcacacccggtgtgtccttatgccggagcattcgtatcaccaccaccacggagtagatgcaatttggtctatcttcacaaagactttccccatcgtcgactctctcttgatgtatgagcctatcttccgtgcctgtctccaccgcttgctcgcacagcttgcggaggatggaattcgatacgtcgagttccgcattggatttgtcttccaatttaggaaagagggaaacgacaagcccgaggaagaccacttcgagtggtgtcgtgtggtggaagatgtcgtgtctcagttcaaacaaacagatgcagggaaggacttctacgatcctcgcattatttggactacgctccggtggtttggcaatgaggccattgtcaatagcatgaagcagtgcatcgaaacaaagctggagttccctaatctgatcagtgggtttgatgttgttggccaagaggataacgggaggccgctagtcgaccttgtcccagtgcttttttggttccgaaagcaatgcgcggaagaagaagtcgatattcccttctttttccacgctggagaatgtctcggcgacggtgatgcgacagaccacaacctcttcgatgccatccttcttggcactcgacgaattggccatgcgttctcgctttacaagcatcctctgctcatcgatttagtgaaggagaagaagatccttgttgaatgctgtccaatctcgaacgaagtgcttcgccttgctagctctatcaaatcccatcctttgcccgccctattgtccagaggcgtgcccgtttcgctgtgcaacgacgaccccgcaattcttggccacggaaggaatggattgacgcacgatttctggcaggctttgcagggactcgaaaatgtggatttggtcggcctatcaatgatggcccagaactccatccggtggagctgctatgaagaccagtcgaccgccgagtggaaggctggcattcagaacggggtaatggggacgggtctgaaagcagaacgtctgcaggctttcgcttcggattttgagaaattctgcgagtgggttgtgctggagttcgctgaatacgatactggggatgattgaagtaccatcatgttgatcaccatatacgagtcacatacatagtcgcctagcacgaacaagcatgaaagcacaaaagccctcttcggtaatagtccaactggtgtagaccaatttttgtaatcattgaagtatttgaaacatgtcacgagtcaatgagcagataattggtcaaatctgctgtcaatcggtgagttggcacgtcggcgcctgactcggcttatcgcgcctttatcaggtgcccggaacgtcattgttaaacatcccccccttcacaccttccccatccactccgctttgtcggggctggctgctttattgtcttcgttaacctattttcgatgatacgagtcaacatatgaacgagccctgtcccggctctcagtcacgatggcgtcgtactttatgccgtcgtttttccagaagcggctcctcaaatacgccctgtctcgcctgggcctggtggacacagaggctttggatccagataacctaggcatccgctggggacaacggtctaccatcgagttgagggatattggcctcaaattagaggtgagtgggtgcagtgaccctccgcaggtggcggggcggctttcatgatcatcgaacacgcgactatagagcagtgcgggctgactgtttacatcacaacatagaaactatcgactctactcaatcttcctccgtcgtgcgagctgctcagcgcccgagttcagcttcttcgaatcacccttcctgccgatttccacaatagtgggatcctgtgtgaggcaaacggcatcgacgtacatattcggttattgtcagaggagtcgaagaaggggcaacatgtaaaaagggaaagcgaaaaacatgactattcggcggtgcccacaccgtctggtcttgcggagtcattccttgagtctgagccaaaggaggaaagggaagagctgcaggctgcaatagcgtcacagtcgcaggtcctgccccaagacccattagcctggtctaccgatgacgataacgagctcggccttgggagtgagactctgtcactgccgagctttgtggccgggttcctaaaaggcgtcgtggaccgactccaactcaagataacagatgcagttgtgcgagtggatatggagttgaagcaagatggaacgtcgaaacggcaacctgaacataagccggatcttgttgcggggctgttgagcgtcggggagattgatgtacatggagtatccgagaaaaccgttggcccggaggagagtcttcctttccgagaagggaagcgactcatatcaatggcagatatcaattttgggttgctttcggatccatcggtgttctcgaactactctcgctttgctcccccagcatccccgacgaccactatgcggtcaaaagggagccagccgtcgagcagagcgccatcaccctccccattggatcgctctgacgaggaaccccttgctatgacccaatcaactattttcgagccgccgcaagcttttggccatttcagtaccaccacggaccggttagaggcatctgcattttccgatggtcgattctcagacgccgactctgagtcaggtagtcaccgtggtggatatatggaggattctcaaatatttggagatgaccccttccaggacaacccggggtacttagactcggttattgacacacaattcgatgattttgatgacgagcagtcgccggtaatacatcccgaagaaggcagaggggccgggagcgaatggaggagccacttatctcatggcacacgaagcttgcatcagagccaacagggcgaatcctctgatgggcccttggtcccctctggcagctatcatgtatcccaaactcacgacacacaccacagccaaatcggctctgaaattgacgaaataacgcaaaccacacagcattatgatgattacgaaaatgaacatgacgaaatatcagaattgagcgtatcatcccatcctcctagtacatcttctccacgtccagagcccgagagaacgagcttaggagaagaaacatcgaatgctgatctcgacgagtccaaacttttctcccacgatgaagcgcaaagcctttacatgagcgctaccagccagggtatgagtgggagcttcatgccacaaatgccaggtgggtggggctcgtttgacagtgcaccgggtgcacatggtgaccgatctaaagtcatcgcacctattgatccggcccactctgcccatgatcaaggtgaagcggattcaagatgcacagccccgtcagaagacaatgtcactgaacagcatgatttggatgaccaagcccaatctcagacattgcacaaggacagaacctcaactccatcatcttctgggttgcacagaatcaatgaaatgagaaaatctgtgcttaccgttgacaagattttgctgtggctcccacctgctgcttccgaagaagaagaagaagaacaagtgtccgccgaaccgtcgcctgtgctacaaaaagggaacgtaggcagtgacctaaatgaatcgactgccagctttgcggaatccgcacccggagaaagtctacttgcctccagagcgtacaaatctacaaggtttggaagagacttttctgaggcacgggctcagccaagtgctgggactggactgcctgaaattgctgtggaagtgttctctgtctccgtgcatttcgatattgcaactggttggcttctaaccaagataggacaaaggttgtctcacactctcggtacggctgaaagagatccggctgagaagcagttgcgaaaggaccaacctgcgcgcacaccacctgttcatcttgtcgtccatgcactttcaataaaattcatcgaacgtgtttcggggcatgtatattcgtctgacaatagtggctcgcctttgtctcctccctacagcatggaagacgtgattcttcgccttaatctatctggtttgaatgctcgcctttcggctcaaagtacaactaccaagctgaattttgatgtatccaagtttgcactcggcttcgcttccgaggatatcatattctttgatgaaagattgaagatgcgtgaatctacgcgtgatgttttagccccttcccaaggtgatatttctatctctttggtcaaatcggcagatttagcaaaggttgacatctccacgctgcctctccatatcaatctcaatatacagcgcctagaagaggctctaggctggatgggtggcctgagcaccattctcgaacttggtggttccatgtcgtccgtgtcaacagtcaaaggctcccctccactttccaaacagcgcccccgcggtgtgcattttgagacacctgccccaggtgttcacgcgccaaagggcacgtcagccttatggaaagtaaatgcccgagttggtgccatcctgctggatgttaccggtgaaactcacagtcttcaacttactacgaccgccgtcaaaatcgtcagcaggtttgaagggattggtattcaaatagacaaggccaaaatgattgggccactttcaattaatgacacatcatctgatagccccgccaaagtcacgctgaacaacatccgccttgaattcctctttgccccgaaggaggttgatctcgatcgtctactaacattgattactccgtcccaggacaaatttgatgtggaagatgatatcatgttagacacactgttgcgccagcgacgacaaggatctgttcttcgcatgacagtgggacgcttggaaacgtccatctcagataccggtgggttggagcctctctcgtctcttgctgtggagttgagtcggctttccaatgtcaccaagtatttgccggaagatgatcgccctggtattcttactttgatactggtccgtgatttccaaggagacgtacacgttggtggagaagttggggacatcgaaagtcgacttaccagtgttgaagttgcacacatcaccatgccttcactcactgcggcccatattggaaccatgaccgttaggcgcaataacaacgaagagctggtggggcatgccctgtggcccccgaacaagtatcaggacccagactcgtcttatccaccggtcctcatggctcgttttatacccgacgaaatggatcctacctacaagatcaaacttcacaacctccttgtcgagtacacggtaccatcagtgacggccttccttggattgggtggcgacaagatgagcggagatttggcaagtagtatggtcaactctatcgccaatcttgcagagcactcaatgtcatcaccttcgatgacaggacgatcgatgtcgaatgaatccagctcctcgacaaagccaattaaactgtcagttgtgtttagggattgtgtttttggtctcaatcctcgaaattcccccgcgaaaggccttgcagtcctcaccaacgccaagtttggaggaactattcatggagacgaatctgcagaagcatcactggatgttaggaaagcctcgctcatgatcatcgacgacgtgtaccatgagagtgcttataacctgcaccagcgaggctcagtcgttccccaagacacccaagctcaagcgtatatcgataaaggctacgttcctgtctcttccatctcgtcggcaactgctggtgtcaagctcaccagcgctgaggatggtacaaagtctttggacgtagagctcagagatgagctgttgatcctcgagacctgcgcggattctactcaaactcttattagcatcatgaatgggcttcagcctccacctccaccaaacgtcaatgtcaaatatcgaacagaggttatgcccatccaagatatgttcgcctcgttcactggggacgcatttgccgccgatccccctcttccccatgataatgatatggcaactatctcggaaggatcatccagggaaggtcagttaaccgacgagcttgaatatgtcagcgatttctatcctgtgaagggtggcctcggtggtgcgggaattgaggccatagacacggattctaatgacctgctggacagcttccattcccaataccaagtatcttccagtatgacggaattggatttccagggggaccattttgcaaagaaatcagctgtgggcggaaccgctcatcggtgggactccacccggaacacctacgggttcgccaacgacacgaagctcgagcggagtcctttgcgtgtgcgtatgcgagacgtacatttcatctggaatttgtttgatggatatgactggcagcgcacccgtgatacaatatccaaagctgtcaaagatgtggaaaccaaggccacagaacgccgttccagggggtcaagagtgtcgccttcggcggaagatgaagaggagtctgtcatcggcgatttcctcttcaattccatttatatcggtattccagccaacaaggatccacgggagctccaccgcgagatcaatcatgacatcgacgatttcaccagcgagactgggagctatgcaacaaccactactgtgactggggctggaagtcgccagggccggccaacctctaagagggagaagaagttacgcttgcatcggagcaaacaccacaaaatgacgtttgagttgaagggtgtctctgccgatctgattatcttcccaccgggttcagaagagactcagagttcgttggatgtgcgggtcaaagacttggagatctatgaccacgttccgacgtcgacatggaagaagttcgcaacctatatgcgtgaggctggcgaaaaggagagcgggacgagcatggttcaccttgagattttgactgtaaagcctgtgcctgagctagctgcatctgagattgttctcaaggtctgttatgcaataatcaattactggaacctgtttctaacttgactcctaggccactattctacccctccggttgcacgttgaccaagatgcactcgacttcatgagtcggttctttgagtttagagatgagaccgcccagccgtctgataccccgggtgatgttccgtttttgcagcgggtagagataaacgccgtgcaagtcaaactggacttcaagcctaagcgggtcgactacgcaggactccggtccggccgcacaaccgagttcatgaactttttcgttctggatggcgccgacatggtgctacgacatgtgatcatctacggagtgtctggattcgaccgaatgggccaaactcttaacgacatctggatgccagatgtcaagcagaaccagctgcccagtgtgctcgctggtctagctccgatccgttccctagtcaacgttggcggtggcgtgcgcgacctggtcgtcgtcccaatgcgcgagtacagaaaggatggccgaatcgtgcgcagcatccaaaagggcgcgttagccttcgccaagacaacctctaacgagctggtcaaactcggcgcaaaactcgccatcggcacacaaaccgtcctccaaggcgcggaggacctactgaccacccccaacgccccagccttcgaagaagattccctcgacgaagatgaagccaagaagatctcgctgtacgctgaccagccggttggggtggtacagggactgcggggggcgttcagtggtctcgagcgtgatctgctcttggctcgcgacgcggtcgtcgccgtacccggggaggtggtcgagagtgggagtgccaaggccgccgcaaaggcagtctggaaacgtgcgcccacggtcatcctccgacccgctatcggggtgtccaaggctgtgggacagactctacttggtgcggggaatacccttgacccaagcaaccggcgaaagatggaagatgtaagtggtttccgacaaaccctattttggtgccagtgactgactcagagtttagaagtataagcggtactgagagtaaggtacacgaggccagtgcttggcttggggtcaatgggtggtttggcccttgcatactccgtacatacatgcatagtcgatggtccctttttgcttttcattttcatttccattttcattctcagtcttcagttttgctttttctcattgctccaccagttcgataccacatcaccgcattacaatctcaaattgctctttccctttcacttcggtacttcaagtctttcttagttctaggcatgatgtgggagtcctgagttcgttcaataaaggatcgagatctcgatccagatctatttctacggatccaccaagaaccagaagaagacagaaaaggccatgtcgatcccggctcctatatcggacaacgcggtagcatccgagtatactccttcgggaatttgccacgcatttggggagactctgtactaccagtagagacacacagcattgggaaaaatgccaagttccgatgatcaccgggcctggggcagcgaggcagcaatccattttaaattgcatagtacattatgcatgtgaaacacaaatctgggggttgcagtcgtattgcagggcagatgacttgggatgaaatcgagatgagctggcatgccgatctgtgtaagccaacgtaaacgtgtgtatctgcatttgtgccttactacttccagttacgagttacgagatgcccaaccatgggatcaaagaggtccaagagtaatcccatccaaacatcaccactacgtaaattctctctcacggccgaaaggacctgaatcatgaagagccaagatcacatgacccaataaaaaaatccccttccttgcatcaacggtgcatcacggcatctgcagagtactccatacatacccaaggtacggaggatatgcattgtgtatccactgccttggaaggaagtccgatccagaatgaccaagtcatgatgttgccagtggagaaggaaaaaaaaaatcattttgccacattgcgattcgaactatccaatcaagggtgtgaaggccgccacagccgaaaggtcatttttgccttgttcagcccgaagacacggcgttctgtacgccgactggttctaggcttaaagaggcggttggtgaagattagggatgtatggtgggtgattggttggagatggagagaggctaaaggcgctaaaaggactaaaaggactaaaatactaaaaggaggctgagatcatctgcaagtgatcacaatcacattattcggtttctataaacattaataggatgcccaacgtatacactatctaatgtataataacatccataacatgagtagaccgacttttccatgacgttgacatttgatcgacgaaccatgggtcctttgaaaggcctcgaccttcacatcattttctcttctcttcttcttcttcttcttcttctctaattggaccgggctggccggcccctggctttgtggacttttggttcaattcaattgattcaactgattcgattcaactgattcaactggttataaactcattgttatttctgtggataacgtggataacgtgggtaatgtgggtatactcagatccaggcacattttctattgcacatttctattattctctcatttcaacataaaattacttcttcctgcatttctgtaccttgcagtcttgtttattgtgatctattcatatattgcgaccggtaagcctatctcccccatcccttgcggcgtaaatctgacgaatcaagtttagtgtggagaagtgggtttcgatctactgcattggatatgtcgataatctaaaaaggtggtccgagaacaaaacagtgcaacgagaagcaggacttcaaagacaaagaacgaaatcggtgatacttacaattgcaaagcacaatgaatgaaaacctcaactactccgccgctaatggcatatggcacggcgagctgctggacagccccctctgccagaaatgccttcaactccatgatcatgcatgtactcctctttccaaaccctttttggcagactcggcagacgctttgtccctcccccctcgatccatcaaatcccgtatcacgggagccctttctctccacgattaccacaagttcctctccaagtctgcagaccgcagtggcgatcccgtcgatcatacaggaaagaaattgaagcgaaaaacagctgcattgcatttgaatcgctcttcccctctttccatctcttatcctgtatctgtatcgtccatcgcctcgagtccgccgcctctgtctccctcctactcgcacagcatcgtctcgcagtggagtgaagagcctgagatcggggaagcccagactggtaagcttctacaattgactttccttggatactctcggaacctttattgatagtttatagttcagtaccaatccactcaaagccctcgactacccgttgtctcggatctcgggactcgagctagacctaacaggaagcgagtggtaagttaactgaaacaccgcacaaagacccagctcactgataatagtccaagaatacctttcgtgaaaagcttcaacaaagggcccgagctcaagcagaagaagctgagcgtgcctctaaacctcaaacatcggactcaatgctggccagtacgcaggccgttgccaccgtttcacacggtggtgcctgctttgagatcctgaatccgcgcaagtcgctggatctagcacgcatcgtctcatacattgaagacgtcgataattgctccacggtctcgacagacaatcagcgagactctactttccccatcgagcaaggactggaccgggtgtccttgtcccaattcaccgatgcctcattgccgtcattctattccaccaactcgttgtacacttccctcccagacgagccctcaacacccaagggccagccgacggatatcccgtcgtcctcgccgcggataggcgaacacgtccggtctctatcagactactctctcaatgaacaaacattcaaccactggagccggcctgcacaacgcactgaaaataacgatctacgcatcgacacccacaatgaccacccaagcagcgacaaagggaccccgcagtcaccacagatggcctccatcacggaagaatccaaccctccaaacctagatttctcccggcgaccctcaaccccatcaacacaaaccttctactcggaaagcgagatcggcgagcccggctcacccgtctacgcaaacggcgactgggcccaagtcgacgagcgcgacagaggcatcctatttgacctacaggaagccgaaacagctgaccagcacaaccacccggactaccaatactacccatactcacaagaacaagaaccaccaacacctcgcgaaactccgctcgagacaccaagcggttcacctatgcacccgaccttcgactccgcctacccctacccaagctccatctctacctccaaacttccctactccgctccctttgatccctacacctacgacccggtgtacttcgacccacatgtccagtccgtgctcgcagccgcgaacgctgagacgatggggttgcgggggagtcctgcacgcgcactggatgagctgcagcgaggggcgcgctctggcgagaccagtccgcggttcgagttccagaggagaaagagtgatgaccggaaatccgggacccagaggaaggggttgaggaagttcttcagttggaagtcgtaaacctagttttgagaactttgttactggtgggattcgtggaatcggcagctggctgtgtgactttggacggcgaatcagtgatttacgtccattatgactgtgaagagcgtggcgcttgggtgttggatcggattggaatggatggtctggctggacacgggtcttgattctttttctttttggcgatttcttctaccttgtcctttttattacttttattgctttttctattcgggtctgagactcgcaatgtatctatatcaatttacacttgacgcatatcaacattcgggttattttcaactttccaaagtcatcaatttctgctaggaatgacaaaatcctttacaaattgtcgatcacgaccaaccaaggaatgtgtcagaatgctagatcgatgtttatttctttcttataagggtatcaaatcgagtatatacaactccatccacggaatccagcaccaccataaccttaatcttaacctaacccaactacctcaatcatcatccctctcaaccatcgacgccaaagccgcactaacaagactcttcctcctaagcccctgctcattcctcttcccaaatcccccatgagtcttctcaacccgactagccaaaacccccgcagacgaactcttcctcctcgccctcccctcaccaccctccggcgcaaaccgactcctcgaaagcgtaaccgccctcctccgcggcgacgaccgcggcggcaacgagctaggatgacaatcgtcttcgtcgcagcagtccgacgtcgccggctcatctagcagcgagcgctgcatagcctcgacctcggactcgttgcattgcaatctggagatctgctggcgctgcgcgcggatatcttgctggtatggatgggactgcgggttgtgaaagggttttccgagaccgaaatcaggtaattcggagacgaggtctggtggcatgaaggttgggcttgttgttgaggaggcggagggcgaggagagacagtcgacgccgtcgtcagagtggtctgtgtccgggggtgtgaggacgtatcccgcgcccgggtagcgggagactggtgtgtgtctgccggttcggtgtgtgtgttgggactggaggtctggtgttggagtgagggtgtgttcgtgcagcttttgggttagggttgagatggagaggcgtttgtggtctgagtcgtaggggaaggggacggaggttgggggttgttggtttcggtggaagtgggaggagcgcgagcgggagatgttgcggaaacggtgggattgaggtgatgggcagcgcgaggagagtggtgagattagggtgctgtcgctgtcgaccattagtcggtcgtctgggtcgagggcgaggcgggccggtcgcgacgatggcgatgtgaaggagaagtcttcgaacattttcttctattctgctggacttggtcgatgtggtttcgggtgtatataaagtatgggagtataatgtgatctgcgttcctttgactggaaggtggtcgcggttgtcggcctttgagtgttgcgatataggttttcgggaattgactacctacacttgaatggtagggtacacgaattgtgtacagtgtatggtctttgattgatatagtgcaggcgattatttgcccctcgggaaaaaaaaaatcgactgtcaaccactggttgaggttgaggcgaatgtccacgtgatcggcaactgtgcagccacactttattcgtaggtactttgcttttgcttttttttttttttttttttttttttttgtcgattttgctttttgtaagaaatacggggtatagttcagtttcaaagtcagttcaatgaatttactacttttttccctcttcttcataccctgcaagattaccaagaccctggttctttaagtgcatgtcgatcttcatgtggatacccgtgccctaagttgatctcccgactgcgaaatgcgtctacaacagtgtaataagtagtatagtagttttgatcaaatatacattcaatatcgtgttgattgattctccggcgcttccctagtttccgggatttccctaataatgagttacgatgtacgagttatataaatgaccctccccattagaggccgactaacctcatgcgcatatctgtctacatgttatagtattatattggtctctctgatcacgatggagatctcgattctctataggcgttactggatacacacgctagccgcttacggattgaaatagcttacgcttagcacatggttatgatgaaacaacggccaataacccaatcgaaatggcaaacgtagatatggtccagccgcttgatggcagagtagtatcagtaaacatgtaccgtaacaaagcactagcatagcccaagtacgccatacgtagtgcgaatcatcaaaagccactcgttggaattcttaaaagtgagccatgagtgtgtcccaatcaatcacctgcgtgaagtatcatcactgtagcttgcgtgttcagcttcgtttgtggactgtggatgcagccgtgggattaacacttatgggcaggttgttgtgttccaccatggggtcctcaaccataggacccttctgtgaacccgttctgcacagcgacagagtaaggaggtcatctggcagcatttaaatgggtgcagaagcgatacttgcaggatatcaacgctgcccatgaatatgtaggattgttcgaaccttgagattgaccatacgaccgtcgacctggtaccagcaccaggacttgctgccccaggaaagattgctgggatgtagtctgggttgggatatgggccccttagactgatgtcgccctcctagggaaaatggtcccctattgcagtgtgaaatctgcaatacctggtgctttccccctcagcaaccggccactctttttaacttcgttgctttttgtcacagctgtttccacctttgtagtggtccctaccaagcttgttcccatttgtgttcatgttgcggtggtggtggtagtgcttgttgggattggaagggatctcgatctcgttcatgggggcagcggaggagttgttgagtggttcttgaactgcttgatcgtcctgttagcgctttcatcccaaagtcagaatatactctccgcataagggttagggtattgtccatcattataaagctctgcacaaatgaatgggcttgagagtctgtcacaataactttcataaaatgatataattctaatcatggactcaactcgataagaatctcaccgagcccacacgaagcgtggtcgaagcgtggtcgaagcttctaacaagatctcgagcattgctaccgtcgcattagaaatgcctggcatgcgtcagccatatgagaagctagtccaagctggataggatcaccagttcacagagttggattggatgcagcgcttggtattcgcagtctcgtcttctccccaatgttgttcactccgattccaacctcacgttttcagtgaaactgtcttgactttcaattggcgcggtccggtacggcgcgcagaatcgtgagatttagccattagaggctgaaatatggtggcttcagaagggtctcggtagttaggtggagtcggcttcatgctataattctgagtagctgagcgtaggttttggtgctttgcaacatacccgcacacaacccggcattctagacaaacatcctgctaattctggatatcgacttcgaaatggaatgttggaagcatagcgggaagaacagacaccaaatgcaactcgtaacgaagaggaatggataaatgcaggctctggcatactgcccattctttatgggtaaccggtgtatgcgaacgaggtgtgcgggagcgaaatcagtcgagcttacataggtagccgtcggattgtggagaagtctgatggtggtagctggtagaagctggtagatcaagttggaggtcaggtcttgctgggccctgctggagaaagtctggaggcctgaaccaccaacaatagtcgaaaggaaccggtatattccgttagatcgacctgccagtaatggatacaatatctcaactatggtggaggtcataaaacgccgacatgggataggtctaagaggtggtgaaaataaatcagagggtttcactaggcaaggaaaggcaaagccttccaccatatagacgacggagaattcacggctgtggttgagagacgaaggaaagccttgtgcacaagcatagctgtatgaaggcgccttggaaggtttgctaaagttagaactgggtaggagggagggaagcgaggagttggttaaatataaaagtcagtgtagtagcaactgcaaagcccaggtggtctagtgggtaagtcgaccatgagccatatctgctctagactaccatcctagaccaaaacaccctgggttcgaacccccctaggaccgtaagtcgttggcgagaagctcgcttctctccgctgggtttgtctccttttttttcctattccggtattttttatcataagtcattatattctccttttcccccatgccttttattagtacttgtgatacattaagacagtcttaaaacgcgtttgatgggtaaatatcaacagtctcttttggcaactcgctcccaaggttgacgttttcttctatctccgatatatggaccacagtcgctctaccatagctgggatactacagtggcttttagtgagaatgcgtactttcatagctcttagaaaccacataaccctgttttgaatatgagaaacgaatcaatccattccattcatgggcatacaataaacacatacgagaaagcctttgaggacacaagcttgactacgcaggcatgcaaatgcccctcgtgtagttatctcactcgacaaaatgtataccactgtgaatgttatgtttccagtacttatgtatgtattctgcctcccatgagcaggccatatcttgcgcattagcggagctcacttgctcaactcttggcagaaagcggtgttgatcttggtctctgttcaaccatggtatcatggacttggaaacatcccataacgcctatgcactcgaccctgaagcccaccgaagaagcccaccgaacaaatcccggatattagaacgagaccaggtgtccaggacttgaacaccacactgtcctggtccaggaatccaggacatgtgcaggaaattgaagcatgttgaggtaatgggtgtcaagctcacatcctgtacaatgtcatcagaccgtatgcatgttgagatgtgattccccaggggtaactttgaccataaggtgacagcgggaatagtgctaggctccgttatgcaagtgattcatggagacatcccggtcgtgtcatgactagcaagctccaagtcctcaatgttcgttccgccagctttgttcgggaaggtctcggttccagtgcatgggaagcatgggaagttgggtcttgttgacagctcctgcagatgggaaaaggtcatgaagcggcagaggacacatatttcggtatagctctgtagaaaatatcatcaatagtagtcgctgtcttcgagaaaaggatgatactcaccacgtattgattcttctgatgttcccacaaaatggaggcatgtggtgggcatacagagcatcccatttgttgaaaactctgtcaaagggttatcgtcacagcaggtgatttctcgtctcatcctactatggatttgggctcaagaaggtcgccaacagatactcagtagttttcacggtggaatttggttactgactgattgacttgacaaagaggcagacagggcaaggagatagtgacatgagcaaacgaggcaaccaggttttgtgctggtgcgtttctacacgatctttcaactcgagaaaatggatattacgtgtattgcgagaatttattgcagacataagacaaaagcagggcaaagctacatacgtgtacatagttagcgtaccctctatgtaaaagtatgtacatctttatgttaggtactgcatgtatgtttccatattcgcatctcataatagctttgcttgaacatttgaaatggtcaactccaaaaatggagatccctattaaccccaacgaagatgactccaacaagcatggggtcactgacccactgacccgatgtctccatattgcgggggaagtaaagtggggaatctcgcggtacttcggacttttgtccgcccactccattcttatcaatggccatacaaagtagtccatcccctccaacttccctttaagaagcggcagtacgcctgattatggcgtgttctcactttttgcgaactctcccgagaacccgtcttcaatctgccaagcctgtcttctccaatcctgctagaaccttttcttcgtcacgaatacaagctatgttaacaacagaactctccgagactgaggtctctgcgctcagaacaaacaaggaacgcctggccagtgatcttcatcactcgtgtcaatggggatctggaattagatggggaaagtaagccacaaccactctttccaagattgatggagaatgacagctaacgaaagcctcgctgacttgatagtggacctacagatactggcatgcagcgcctggcgctttcacaagacgacaagagtgtgcgtgattggttcatccaaaccatgaaagctctcaagtgcaatgtgaccgtggacgagatgggtaatatctttgctgttcgtcctggtcggagagcgaatgtaccggccacattcattgggagtcatctcgatacacaaccgactggcggacggtacgatggtatcctaggtgtgttggcaggtatcgaagtcatcaagaccatgaacgacatgggtctggagacggagggcggagtcggggttgtcgactggaccaagtaagatcagaacgttcaacttggagagaggaatatcactgaccgtttccagcgaggagggtgcccggttcccgatcagcatggtctcgagtggtgtatgggccgagtgcatcccattggcgcatgcgcataatctcaaagaggtgccaactgtggcatcgctgccaacggcggcatcagcaccagagaccatgaagagcgccctgcagaagatcggttacttgggtgatgtcccatgctcgtacaaatctacgccaatggccgcccatttcgaagttcacattgagcaaggcccatacctggtgtcagcaaaccagcgagtcggagttgtgacagccgtgcaagcgtacagatggttccgcctcaacgtcatcggtcgagatacacatacaggaaccactgcttttgaacatcgagcagacgccctctatgcattcgctcaaatgatggtacgcgcacgggaagtggcagcttcgaagggttgtctagccagtgtcggcattgtcgaggcaaagcccggtagcgtgaacacagttcctggacaggtgagctttagcttggacatccgtgggcccgagacagagcaggttgccgaagtcgagaaggagctgcgcacagatttcgatgccattgccgccgccgagggtgctggtattggtaagccttgccgcgtcgagtggactcttgacttcgactcgcctgctgtcaagttccacgaagactgcattgactgtgtgcaacagtcagctcaggctgttgtcgcagatgcttctgttgcggatacaaagtcacttgtgcggaccattatgagtggtgctggccatgacagtgtcttcacctccaagcgtgtcccaacgagcatgatctttatcccatgcaaggacggtctcagccaccaccctgaggagttctccactgccgatgattgtgccactggagcatctgtcattttgcaggctgtggtccgctatgaccggaagagattcttgtaagaagtgctcaagtagtaagtctgacacaacaggtctcaataggtatagttcaacaggtacaaagaccttaaagacacgtcgactagtcaagaaagctggaagacctacacgaagtttacgaaacagaccaattccactaaagccatgaatataacatttgagtcaatctacatcaattcacacagattacatcatgatcccagtggaaacataaatttcttcttttttattttgtttcctgtatccccaagtcccagtgaagctggaacgagatcttggtgtaccgaggataaggcccgtttcaagaaacccctagtccggcagccgaattcggatacaccatcaagactctagattgaccgagaagtggttgacaggacaccaatgcctctcagcatttactcctggggagcggcaccacggccacggccgaagccaccgcggaaagagggagcgaactcgccgggggcaccgccctccttgccctcctcgcggcggcggtaaccgccctcacggggagcacggggaccacgacgctcaccgcgctgctcctcaccgcccatcatgccgcgggggggagcgtgggaacgctgctgcttgatgtgggtggcggggacaacctcggcggggaggtggagccactcacggaggtagtccagaccctgttgctcaattagtattcatacgtgtagacatgttggatgttgatggatcatacctcgggggtgagggtgtagtagtagtactgccacgagaactgggtcttgacgaagccgcgggagtccagggactggagggccttgatgacatagaggttcttggtgtcaatgtcagcgtgcttgggaaggttgaagtccttcttggccacgagcactccctctagaatataggttagtaaatctgcacacagctgactcgagcatagcgtcgtaggtcgcggagacgtcgacgagtgttctcgttacataccacggaagaggtactcgtggatcttcttgcggtcgtccttggggataagcctgtgccattgtcagtgaatctgtcggaaatagtcccaaaaaacgaagatacgtacattgtcgcgagttcctggtgcaagtcggggaatcgctttgacaacgcccgagaattatggttgatttaaatgatggatgaagagtggagcttcgctgcgagaaaagtgcgacggtccgaattaggtgtagggttagcaccctaatcggtttgtggttcagatcacatgatacagtgtactcataatgactatcacgtgatggatactcgtcagttgttatgtaatccgcgggtatacagatgatgagtcatcatggggcgcctgatcttatcgcaacatcttccatctttcaagcctacaacagtactttctcctacaaacagctcaccagttgcactctcctgctatattggaactgcgtccgacaatctcaaaatatggccccctcaaatgttaacgtactattatcgtccttcccaggactgtcgctgccggcgacactttcgttcaccttgccatccacagcgaccacatcggacctgacagccaaaatcgcttcatatctcccggaatcacttttgcttcattcgctcgcccttactacaacaaacaataaacacctcacagccacctccgagtgtatccgatctttcctcccaacccgcgatggcgtctttacctctacactccttccgctgcgcctgactgccccgatccgtggtggcaaaggtggttttggctctcaactgcgtgccgctggtggccgtatgtccagcaagcgcaagcgcaatcaaggcgataacaatagctccagccgcaacctcgatggccgccggctgcgcaccgtcaacgaggcaaaggcgctcgcagagtaccttgctgtcaagccagagatggacaagaaagaaaaggaggaacgccaacgccgatggcagtctgtggtggagatggccgaaaagcgccaggatgagctgaagaatggcagtggcaggcagaagctggatggacagtggatggaagatagggaagagatgagcgaaaagacccgcgaggcagttctacgagcagtgaaggatggccaatggacagacaatcttcgcgacgcaatcttgggtggatcaagcaccagcgccagcgatgagggcagtgaggaggatgcttcgtccagcgaggacgaggagagcgaggaaaatggccaatcgtccaactctgtttctaagccttctgccgctccgaaggctgcgcccaggaagttcattggtttcgatgatgatgacgagttcatgagcgactccgatgacgagatggatgaatctgccaaggggaaaggaaaggcacgtgcttgatatcctctcataaccaatatttgtccatggttcatgacggcgttcttttgctactattgtcagggattctctagcgcatctgtgtttcagcgccttctgcgtcaataatttcagcctccgataggtttgttcaaaacaacaatgaaaagttgtccatctccacattttcaccaattctagttatcttattttattcataaaacgtactgaacaaactagtattctcgttgcggaacgttgattcatagttgtacggtggcccgaacttgccaagtgcgctatcgatagataactgtttcccaagaaaaaaagctccgcaactccgcaatttcacaagccatcatgtcgctctgctctcgagcagtgttcaggaactcgagattaagtctactgcatctgcccctaaagagcattcctcgatcccgggctcgaacgctattttcactttcgcgcgccgcgccacaacccagagtccttacggacctccgcagacaatgtcggtgcttctcaacaacctgctttcaccgggaacagcccccatctgagcctcaagttggcaccctagccgattcccttcccgtgtgttgcccaggatgtggcgcattctcccaaacagttgaggaaaacgagccagggtactatggtacatcccgaaagcaaattcggaagctactcgccgcgaggaaggaagcaattgaacacgaaattatacaacaaaacgaagctatatccactgagggagataagttgagcgcacagcaggacgataccgtcgaggaggcagtgccacccaagcccattcaaggtgggtcatctagactattgctcaagcgcgtcattgctgactgaatataaagatgcagcttttccggatgaagccatcgatcccgagaacaactttcttgggcctcccggtcgaatcaccgaagtctgcgatcgttgccatgacttaatacaccacaacaaggcagtctcttcgcccaagccgactattttgtctatacgaaactatctagaagaatcgccgcacaggcacaaccgtgtttaccatatcattgatgctgccgatttcccaatgtctctcgttccacgcattcattgggctttaatgctgcaggagcaacgttcacggaaccggcgatctacgaatgagaaatacgaacgcggaagaaaacttccatcgctctcatttataatcactcgctcagaccttttggcggcaacgaaagagcaggtagactcgaagatggattacattcgcacagagctccgcgcagcgttgggaagatcagggagggaggcccgtttgggaaatgtgcacatgattagcgcgcaccgtggctggtggaccaaggaagtcaaggaagagatccgagagcacggcgggggaatttgggtcgttggcaaggcaaacgtcggaaagagcagcttcattgaagcttgtttccccaaggattccaggaatgtggacaaaatcgaggagtggcttcaacgccgccgtggtgaagatgagattccaaaccggccagaggccacccttcttaaccccgacagccttctgccccctgcccctcgagaggatctctatcccgtgctcccagtcgtgtcttcccttccaggcactacagtctcgcctatccgtattccattcggccgcggaaagggcgaggttatcgatttacctggcctggagcgtggtctattggaggattttgttcgggatgaacataagcgtgatttgatcatgacgaagcggatcaagcctgaacgttcaaccattaaacccggccagtctcttctgcttggcggtggtcttatccgcatcaccgcggtgaacccgcaagatacggtcatgtctgccagtttcctgcctctcgagtctcacataaccaacacacagaaagcaattgcgacgcaggccgaggaagttccctaccggggaactgtcattatgaaagaaggaacaggcagcacaatggcctcagccggtgtattcgacttgaagtgggataccaccacttcaaatcttcctacctcgctcgcgaaagctgtaaatgacagggggattccggtaccttcattgccataccgcgtaatgtcggcggatattctcgtcgagggctgcggctggatcgagctcagtatacaaatccgcagcaagcgggatgctgaaggcgaaccttcctatccgcaagtcgaggttttcactcctaacgggaagcatattgggtcccgacgtccgattgagtgttggaacttcattgcagagaagaagaaaatcgacaagcgcaagcggccgcggacgagatattaattgtgatttgggtgtttgaaaatgtacattaggccatttagcatagcggctcggcgtttctcctctcttgtagatatgtacaatagtcttgttataccaactacatcgcatgttcccaggttacacaatatgctcatccccgcggtccccgcaggtgggggttttttagcctttcactttaattcatttaacttctttaacttccaaggttctttcccactttattttgactccctgtttattttgcttggtattttctcttgcactaaaccgaggttgctcctaagggtgattgtgcaaaactcatctaatattggtgtcgcaccaatatccaatataggtttcaatatatatatcaacccttgacattcagcaaaacattcacttgtctatcgcatgatgttatcttttcgagggagcgaaaatgtcagggaactagctatgccctggcgcttcagtctaactcagacctacgaccccgtggagaacccgacagggctcatctcatttggcatggcagagaatgtgtctatatcccccacaatctggaaatccaaaagctaaccctcagccagaaacaaatgagagcagagatagcaagatatatcaacgaaaaggtgcatatgccaatattcgcctttaggttggcatcatgtccattgaccgaaagtatccagctctaacaacctcgcctaggttgtctttacccaagattctgtcagctaccgctcaagtgcgccaacagctgcaagactaccagccgccgcagcagttcatttgaacaatatcctcaaaccccatgccccaattgatcccgagcatatattcgtcgcagactctccaacatctcttggcagtatgctgggatacaatctcgcagaacccgaggatgggatcctcgtcagcagacctgtatacggccgctttgagctcgattacggcgttgaatctggagttagaatggtctatgctgacacaactgcagaagaggcattctctcctgcttgcgtggaaaattatgagcgagctttgaaggaatgcggtaaggagattcgagctgtgctgcttgtgaatccgcataaccctgttggtaagtaatatatgccgcctggtccatggaattgagctaattgcttgcctattctcaggtcgttgttacccagtcgagacactcaaggctatcgcccgattctgcaacaagcaccgtctccatctcattagtgatgaggtatacgcctcctgtgtgtttgattctggtgactctaccgctgtgccgtttacttcaattctctcgctcgaccttgcggaattgatagatcctaatttggtccatgtgttatatggcttcagcaaggtaggcttcggacaatcccaacgaaggcacggaatttgacataccattgtaggacttcgcttccggaggcctccaccttggtttcttggtgacccaaaatgagcagcttcgtcaagcctgcaaagcaattctgtgagacctttctctttctcttgcaccgtgaaaagctggatgatgttcgacgtgaaactgactctatataggagacttcatggtgcgtcacaagcagcggtgactattggcaccgcaattctagaagaccaagcttttgtgtcgagcttcacagcagaagcaagaaaaagactcgcttcagcctaccggcttacaacctcggtgcttgacaaggaagggatcaactatgtcaagggcgggtgagtatacgaactccgacgaggcattattcaaaaccccctctaatccggtcatcagaaacgctggctttttcgtctacattgacttgtcgccttatcttcctcctgacggcactattactccgcgaaaccgagaatttgcccttgcacagaggcttgtcgatgctggtgtcttcttgcatcccggagaggagcattcgaggagtattgggtggtttcggttggtgttctcacaggaagaagatacactgaaggaaggccttaacaggtgagtcctttgcttatcattcctgcagattttgttcggtccggctgattgatggattgttttgcgacgttttcagattgttaagtgcattaaagccaagtgcatgaagcattctccacgacactacgtgtccgtgaccgacggggtgttcgtctatatgtgtagttacagtgtcggagtgaaaatactgtcgcaatgtgttccgtttataagaaactcctcgaagtcttacaaggttcaatccatcgattattaagctcaaagaattgaagaattgaaatgctatatgctattctggtttattttatttttgcataagtcatcaagcatgattttgaaaccggaaatgaggctgtatttttcaaagaaatgtcctttactcgacgttgacaaactggaacgtaggggttccaggcacggcattctcgccagacagaccctcacgcttctcaccagtgccaacaacctcaccagtcttgccaccctcatcaacagcgatgacctcaatctccttgaagccggaggtgcgcttcagaccgcccaccatctcagacagaacagcgaactcatcgaagggaagcttgcgatcgaagacagtggcgggggactcgccagcattgaccagacggcgcttcaggttctgaacgaagggcatggccttcttcatctcaccgaacttgccgacctttgcgttgagctccttgtcgttgaaggagaggttcagggagtcgaaggactcgcgcaccagatcaatgtacttctcctgccagttggggtacttcttggcaacgaagatggtaagcttcttgggcttgcgggggtcgaaggtaatggccttgcccttggagagcttcttggtgaagttggcctcggaacccatgatgttgcttgcagtaccacggacgtagttctgagcggcggtcagctcgggagagggctctggcacggcagggaactgggcgaagtgaatagactcggactaaatggtattagatcattgttgagcatgaagtgggggggggggggaagaaaactgaccttcttgagaacctcgagccagatgtactcagcccagtgaggagcaatgggtgccagcatcagagcctgcagctcaatgtagcgcagaatggtatcccggtgtatacccacgccagcagcggtagaagcctcacggtagctgtcacgggagctagtgaagtcatataggccagacttaagagcaagcttgaagtcggtgctatataaggcgttagttatcgttgtcaatggacactcagcgaaatgcaaacttactcctggtagtgcttctgggtctcgcggaccaggctgttaagttcgttattgaagagcttgtcagcgaaggcatcagcagggccagtgcgcagagcctcgtccttaacaacctcctcgatccattccttcaaggtgtagagacgcaggatgttgctgttggcaacagactcttcgaagttggcatcttcaatgctgtcacctgcatcggcaaatgcaatacgggtagcatccgcaccgaacttatcaacggaatccttgagagtcaggaagttaccggtgctcttgctcatcttctcaccgttgaggagcaagtggccgttagcacggacaccacggggccagtactccttggggaagagagcaatgtggatgtagaggaagaaggtcaagtggttctgaatcaggtccttgccggagacacggacatccagagggtaccagtactcgaattcgcggcgcatttgctgcagagattccttgctgattccactcttagagacgagttcgtcgctgatttcccgtcttgtgaaaatgtagtcccagacctcatcggtcatctggtccgcggtcaccttcaaggggccggtcgtcttgccgtaccggtcaccgtgaaggaggtgagcgatagtgtagtaggccatgtagacggtgctgtcactcagagactcaaccaggaactgcttgtcccatggcagttgggaaccgagcccataggttctggcacatgcccagcggttcagccaggacagattcttctcgaaaccgttcttgcattcggcagagtaggtgttgaggttgttgacaacatggttcagggtctcctgctgccactctgcgtcattctcaccatagttcaggaaccactggcccaggtaggcaacaacacagtcgtcaccactacggctgacaaccttgcccatggggtcggcgaaggggaaggcatcaccactctcatagagctccttgcggactttgtccttagcctcactgacgggctcgcccttgtagttaccgacgagcatagtacccttgtagaaaccttccatgtaggccagatccttggcctgggccagctgtgtcacgtccttaggagagttgatcttcagctgcttgaccagagcaggggcggtcaagttaccgtaagtgggggtctcaatgagggggaagatttcaagctcagcccactccttctgaataccgtagtactcagccttcttcgccaggtccatcagcgtggcgtaatcgtcagggctgtcggaggggacggaggtaacaacaccagtacccttagctgccgaaacactctccatgggcaggatgcggatacccgcggtgtggaaagacagaggcgcgttgaccagtgttccaatgaaggcggaacccggtgcctcaagaacctgtggcagctcgtcttgagtcttggggaacttatcaccgaagaaatgaccctggaaggccatgttccacgcagcacgcttggtcacgacaatgtactccttctccttcagcttgaaaagaccgtagttgatctttgggccgacgaagcagctagtctggccatacatggtctcgggacgcagggtagccggaacgaagtataccttagcatcatcctcaacctttcctttcacgagctctgccatttccggtgaccactccttaacttggagtttgatcgcagagtattcctgaggaccaatgccctcaccctcggtgcggtcgtggtccatgcaaggctgaccgtccttaggcgagtagacggtgtaacggttgccgtacatgatcttgccgagctcgtgcaggcggttcatctgccaacgcacgaaagcatcgtagtaggggttagcgtcggtggtaacaaactgtcggcgccaatcgacacgggcacccatgctgtcaagatcgcggatggcaagaggagggaagtggtcgagccagtgagcagcgtcggcaaacttgtggatttcttccaggggaacgccaattgccagcataatctggaactggtacttcatcttcacggtcttggcagcggccttgctcttcttgccggagaacttctcggctgcctcggtcttgacctcttgtgtgggggctgcaacggcgtcctcggcggcctccgcctcctcgttgtatccttcgaagcccttaccgaacttcttcacttcgttggcgagcttatcggcacaggccttgataggcataccggtgcagtggaaacccagagggaaaagggcacgcttgccctccatgcgggcaaatccagccatgaactcaaccttactagcagtgaagctgtgtccggcgtggagagtaccgttcatgtaagggtaggccatagtaccgaagaacttggggtacttctcacggagctcggcgggggtcatggcgccctggggggcttcctcgaacgagggcgcatcaacttcgaagaccttgttctccttccattgtgcctggtacttcttttcgattgcgactagggtgtctcgcttctcggtctagcaggcgaaatgttagaagatgaaaatcggcgatggtgggggaggggtatatcaacattttccagtttgagggtgttcttcgagctgttgctcgggtcgagctcagctacggatgcagctgcggcggccatttttcctgattgtcagaattggccaataattcccttgaagagcggaggggaacaaaagaatggcggggcgagatataaaatctgtttgctcagtttgtgagtcaatgtaatgcgagtgtattgtattttacggggggaactccacactatagaggccgtttagaacgttgcatagatggattggtgtgtaaaggagacagtaagtagaggagcttggtttaagaaacagatgcgaattgacgattctctacttcttatctgtgtctagagtgagttttaactaacgtgttctctgtgacctgatcaataccatctatagattggaggtcgcacgtgactatcacggagcaacttcttcgccgacaaggccatctacgataaatttccccgatcaacaacctcgcaatttcggccctatattaccgttcttgagcaaagatattgtcaattaatcttccgctctcgctttactcctatatctacacgtcacatcgcataagggccagtccctgtgcggaacagcctttcatcatggtcaacttgttcaagcggcttcgcaagctgcaaactgtatgtatcgcttctctcagctctccccctcgagatctcccaaagtaacgcagaattgatggactaatatgaaattgttcccgcccatagaaagtaagccgaaaccccattccttgagatatccgaccctgcaagctccgaagccgaactcgcgttgtctcccacggtgtagccgatatgcgatcaatcaaactgactcgttccttcactgttccagatgctccagaccaaggttggcacaggcgcagccatcttccccaacgtcgcctccgcatcaaaagaattcccagccgttacccgactccacctcacatatgcacgcaagattgaccagggccacggaggcgcgcggcatttctggcgtaactgccttccacgactgaaatatcacaacccagccgtgccgatgactgtggcacaaacctccaaccagcaaggacccgcagcgttgacaatttacttcgccgaacgggtcggcagtgccgcagcggccctagcaaacgaaaagaaggtcgtcgatgagcttgccccggcccccgaggccaacgagcaatcggccgttctggatatcaagaaccgcacataccaacagatctgggatcgtgtgcaggccatgacgggtgcgaaggtggttcccgcgactagcgatgacattgcgctgtcacagaagttggcggagatcaagaagaggtccggtccggatcgccagcgtgtgctagctatccggcaagcgaagaaggaccaggagcgcatgctcgctgaggctagaggccaggtggataagcaggtgtaagatagtgcagtttgttctagtgttgtctttggattcgattgatccatccaactggtttcttgatcttgagaaatcggctgtctgtagcatagcatcttttttccgttacgactatgtactatttcttggaatattttttaatgcgcatgtcgcattctcgtgtgattcggatttgtggacgctcaaatagatagaggcgcataggtatcaatagcaatagcaataaattgcaaattcaacatcacttgacaatatcaacgccgaagtatgcttggtttaaaaagactcaaaacaaattggggaaaaagtaaagctacgtagccaataaaatttccaaacgactgaaagaagagggtgttacatgacctaagaacattgttagcaagaagaattacccagtggtcaagttaaagacatacctcggcaattgactgccgctcaatgattgatttctgtctctcattgcgcgaaacacggtagtaataatcgctgaagtcaccacattgcatgtggcgcaggaattcttcatcgtgcgtgatgacaatcaactggaagttggcctgctgctggcgagtgcggataatatcatgcagcgactccgccagagagcgaatgttgtctcggtccaggtttgtagtgggctcatcaagagcaatcagaccacaattgacaccgaaacactccgcaagggcaagacgaatgatgatactagccagaaccttttggcctgcactgcatcgacctcgcatgtccatctcggcgcctgacttgaccatacagacgcggtagttgtacgatcggttgcccttggcgttctcgttgtcggagcggatcaggattgtgtcgacgtccgttccgcgataggtcttctgccacagttcgccagcgatggcgttgatttctgccatctttaagccgtggtattgcatgattgctttgtcaagagcgccaccgtatcgagccagatcttcgacggcggctttggtggtctcgaccttgatatgagattccttgtattttgaagcggcatccttataatccgtgttccagtcagccagcagctgcatcaactggtcgtctttggacttcatttcgcccatcttgctcgcctgtttggcagcaagtgcattgtgttcacgagtccagcgttctgactcttgcttgaaacgacctcggtccacttcggcattttgtgcttctaattgctcaacttcttcaacaactgtgttgagagatcgagtggcttgacgatatgtcaagttgtcggagtattgccgctttgtgttttcgctgtctttaagttgggtcgagattttgttgatctcccttgtgatctcgctttgatcggcttcaagtttaccaatttcagcttcgatttcttgaagttccttcttgcttcgctcaagctggcccggacctccccgctgattgtatgagttgatgtcgtcattggcaaggtcaagctgatggatgttctcggataagcgactgatctcgtgctgcagatctcgttcgcgctcgtcggctcgctggctgatatcgtcataacgggcttgggcttgaagcaactccggcgtgaggttttcgatatctcgatctgccttctcaattgcctcccgctgctgattattgagcttcttgaattcctccatccggacggtgaggtccgctttcttttccagctggaatttggcattgtctaggttgctcttgacatctctgaactctagctcgagcttgttgatctctgatcgcgtcttttctttctcattcgtcactttcgaaagggtctttttcaactcccgtgacttttcgttgatggaggctatttcctcctggatatcttccagggtgcgagcggttgaagcgtcctgctgctttgcagaaagctcttggatttgtgatttgatcgtcttaatctcggcatcgtaacgcgcaatagtgcttactgtcttggcaagcccctcaacgtcacgtttgctttctgtcttctcgctaacctttccatcctgagtttccagcttctccagaagttggtcacgctgagattcacattcttgctcttcttgttccagctctggaatgacagtctctgacaaacgaacccacgtgtcgtaggatgcactagcagcgcgggcagtttcgagatcttcttcaaggccctttagggtctcgtcttcggcatcaaggccagccttcttgactagggcatccaacttctttgtgaaggtctggagttctgcctcattcttgaacgatctttgacatgttcggcacagcttggtgcgcttagcagcatcaagacatttggtgagatactctcccattccggcatattgatcagcgtctttgcgagcgagatcgtactgtgcctggcgctccttcacaatttcagggtattcggagggttctgcgtcgactgcttcatggatttccttcacgcattcatcaagttccttttggcgttgcttgaggttcttcttggcagtcttaagcttgaactctacatgctccaattctcggctcacgccatcgcgctcgcgctctgcatcagccacctgctttgattcgctatcgagggcttgctggaagcctcgctctagcgtctcaggtttccaatctggcccaacaaccttcttgaggcgatcgccatgggctcctttcatcgtttgtaaactgcgctcacggtccttcgattctttcttaaggtggtctaggcgagccaactctccggccttcttggtcgaatcaataagctcggtgttcaatctcgaactttcatcctcaaggcggcggatttccgcatttgtgtcctggatatcctgatcccagggagcagtcttggctcgctctttcgcgtgctcaagccttgacgtgatatcctcaacctttgactcaagggcagcctggaagccctcatcaacctcgatttcgttgagcttcttttgataagttgttgcctccttgtcattcgcagcaatctgtcgttttgccgcattcttggtctcttggagtgcagacttggtttgcccaatctcgttcaatgtttcttgaacctcacggagctctttctgggcttcgcgcttcacacgatccagagactggttctggtctcttaaaaggcgttttattttctgcatgaaggtatcaatttcagactggcccatcgtctcatcaaggccacggatgttgttggcgcgcgcaatctcattgatcatgctttggcgcctttgagactgacgctcgaagttggccttgtcgttctcaaacttgccattctcggcttgtttcaggccgaggcggtgccgagtctgctcaatccgctccttgatttccatatagttttccttgtgtgactcttcttgttgctggtattggagctgcttcgtttcgaattgttccagggtagattcgagccattcatcagactcatcaagctcaaccaaatgtctcttgaggttgtcaatggttgtttggatacttttagcttcgatacgctttccctcaagagcaccgaggacttgggcataactttctgattgcgtccaagccttatcagcaagctccgcgacacggcgcatctcttgcgacatcttctgggtctcctcgcgcaaggcctcgatttcgtcttgaagcttgacggaccgtttttcggcacggtctgccttatctttgtcttctttcgcatgttgctccatgatcttaaattttccaagctcctcgttctgcttctttcgcagtgctttgatgttgtcaatggccttggtgtacttcatagcctcaaatatctcgtcaaacctctttttgaggacagatggttcactcattggccacaggctttcgtcttggtgacagaaaatgaccgaatccagcacggcctttgacacgcccagatactgtggcatgatttggtccagctcagccactctcgatgaaatagcggtgcgttcgccattcttaaccataagtagctggccttccagggtcttctgctgccgcgtggtcttcttcaccgtaagctgaaggctgcgcgtggcaaccattttcgctccggaagtagccttgaatgacagcttcacctgggccagtacctctttttcgccgcatagtttcgggtcgtggatgaaagcaccgcctttgctgttcggaggaagatcgcccgttgtggcatatttgagacactcgatgatggtctagatccgcgtcagttccctgctagtaactccgagtcgcccatttcgccattccgtaccgtctttcctgagccattgtatccgacaatcaatgtgaggggcgtatggaattggatggtttcgctgcgcgtattatcgaaagagcggactctagaacaagcagggtttgatgagcatgaatgtaattactctccgcagtggttgcacccggatcagaagttttgagagacgtaccccaggatagagagcttatcgatcttcgctacattatgttagatggccgttggatcgtttcgttcttcttgccgaggtatagagctgttgcacttacacctaaaacccagttagcatcacgacacgtggggaatgatcagcacgtacattttgaacacaagcgcagagatgggcgttcaagcccgttggccgttagcgttatcaaattcaatcagatacaagttaagcagagagaaggctgagaaaagagagtgctcggagcgttgattgtgatcgatcacatagtcccgcgtcaaggcgacacgaaatcacgtgaattgtactaaggtgcggaggcccacagggatcggcggtgttttgtcaaccagcaatggccggctcttatttccaatgttctctctttacaaggagtccagaccctcattgagacgatgtgtacattttgagaggcacattgtccaaccccttcttagccaaatgtcccaaatgtaccgcctcggatttggagaatgagcaattccatcctcaacaccattactatattcgtccgctcgtgcggccattgttttctagggaaatcccctggctatttatgagaaacgtatgtttcagaagcactcaagcctatccctggtgccatcaaatctcctcgtttaatatctctataccgcactcggtatggctctgagtcgcccacaaccttgtgagggtatgcctctaccctcctcccagatgacattgagctccgatgaggtgcatacagggtattcaatggagcaacagcaagcccatggatcctatggcgggaactacggggtgcaaggtgctcaacatgaaggataccagggtgtacaaagcgatggggtctggacagagcgggtcttggatgaaatgaaggacatgctacttcttctcacaccccagggccggatcacctatgccaacccgtcgtgcaaggatatcacgggccgtgtcgcaaaacaactcgagggaagtcttttggcacagtacatccatgaagatgatcagccaatcctccagagagacatggacgattctgttgccacgaaccaatcgttccgtacccatttacgatttcagaagaccaacggcacctattgtctcatggaggcgtatgggcattcacatgttgcaaaccaggaggagcgtcaggcagggagaaccacgaccgcaaatgggccctgcgcgggatttttcctcgtgtgtcgaccatatataaacaaggtctcccagctccttgactcttttttggaatacaagattgagaacgcacgtctgatccagcagattgcgaaattgaagcaagaagaagatgcagaggcgaccacggctcgagtgccctcttctaggagcgaccaggataatcgcggccccgtgaccgagaaccagggccgacgatccattcgttcaggcgaaatgtctagtgatcctgatactacggacactgtggggccgaattcggaggaatccgacacgagccaatcgacgggctatggcccaggacgcaatacccgcgaagtctactcacatatcgacggcatcgaggtcatgacgggtcttaactatgcagagggcgagagatcgcaaggcctcagtacaggtgtcagccgtggccgtcttgtacattgcgatatcgacatcaccacagctgcagaccaagagcgcaatgctcaagaaggtgaccgccgtaaacggctcaaggcccagcatgtctgcagcgactgcggaacggctgactcgccggaatggagaaaagggcccaacgggcctaagaccttgtgcaatgcttgtggctgtaagttttgtggaccgcctcttgcaaccccgctcagcttgcttgtaagctatctactcttggcatggaacgagctaacccattgcgtccttttagtgcgctggtctaagaaggagaagaagcgacacgagtcggcctaattttctggcttatttaactttctggctgaccttccaaggtctctctccattgtcttccatgttcaagccaagattcccccaacgttaacctatactccctgttgaagagtccaggccagtgttcataagtgacgcgactcgtagttggcaatgaactcttcctttgtcatatccccactatccacaagcgccttgctcttttccatctccaaggcttcttcatatgttgtacatatccatctccctcacctttcgcgccgcgaattccttaatctcttttgggttgtcgaattctatcccatgccttgcccactcagtagcccccagatgtgcacgcagctgtgtaaaaggaaggccgtgttcgccattaaagccagaaggggagagagaaagaaggaagagattgattctctaactgatacaggctagctaatctaactacctaggtagcaaactgaggcctgacctaacaagccaggcgtcagcctggctaacataataagaagcatatgcaagtataggttccacatgaaaaaagtcatcatgtcgcaggtccaagtctcatacgggaaagagcacgaagagcgtgcccacgtagtatatcaatgtcgaggcgtaaggcttcgtttggatttcgcgttggagctaatgatcttctccaaagttcgccacgtgtgatagagagtccttggggtataggtaatttcggatcgggaaaaatcacctagaagatgtcagaatacatagtccatcgaggactataaaagccttccacatacctcagtttgtcttcttatcggttggtcagaattattgagttgccagacactggcttctccggacacagtctgatgtgtatggttaagggtccagttaacaatgatggcaacctggaccagaccgccgctaccccttaataagagctcacaatctgcttcgagggtgttaagaggttctgaccagccggattcaaagacaacagaagggaggtgttgatcgtcaggatcaacaagtatgtctggttccttcagagtctttgtgaatggggagttggtgagggtgagagttgtcccgaatgtaccatcaatcatgtctttctcattcggtgtgataaggccgctgcgttcccattcactggcgcagtttgcaaaccagcgttgaatcgaattatgaatcaggttaggcagcttcaaacaaaggacgtggtcgcgagaattccaagactttctatacttcctatcgaggacttagtcttcgaggattcattcgcttcaagatccaccggagatcttgaggagagtcacaaaccgtggtagtaatttctcgtcatcaagacaagcgaaaatagagggcccccaagccgcaggtatatccgtaaaatagtaccgtgccgctttgtccactttcgaatcacagtcttcaagggtccgaacgacaagatcaagaatatcggactcggacttgcaggaaatcactgagaatgactttgataaaggctcgaaagtcagactcattccagttgtaggcgggggcgagaaagttgaatcagagtcaatgggcgagaaggtagtcagggcctgcgagccagacccggaagagcttgaattgaacagagttgaatttgaagctgctatattgaaagataaaatggaatgaagtaggatacgaggttagaagtcgaggggattccaaggttgtgtgtgagagtgatagaggaaagagcgaaggttagctatcccacctgctggagagttggagagtgagaagcatacttccgggatactgttattccgatggaaggaagcgtttgaatttctgccggcattagagatcagagaaatggaaatcaaaagaattcagaatgaaccaagggtagcaagtaaaggctgagatgcaagcaaaacacctgatcttagtgagatggcaagtgaaagaagggtgtgttgctggttagagcttggggtaaaagatatgtagcaatcaaggagtaacaggtgagatactgttaaagcaataagtgatatgcaagtgagagcaaatagaagataagtgaaagactggcgaagatgaaagtgagataatctcatatgcatatgcatatgcctatacaatgagagtgagagatgcaggtaccggcatgcaatagaagggcataagaggcaactcgctgtgtaaggaaacagagtgtatactcaccaaagcagtttgtaagtatcgtggggagagaaggaagaaagaagaaattgctcgggttggtatttatagtcggcaccggagcatggaacgcgggtttatagatttcaaggtcatacatatatagacttggcctcggcggggtgtatggagatttagtatggagatttagtatggaggacttagtatagagcaattatataggcaacaacaaatggtatcacaaaagcaatttcatgacaaacaacaattcaacccccactcaagccttagcagccttctttggtggcggcgggaagtacatcggcgaccctgtcgaactctccgggctgacttcatgcgattgcggcgacggatattggggctgagtcgcgcgcgagttatcccgcaggggaaggtccgaggcggtactagcattgcccagtcggttgaaggccagcgtacggggtgcgtagggtgagaaacttccaccaacagcgatgggcggaacccctggggtgcggggaaccatgcctggtccttgaggcattgagccaggggtcatgggaatcatgctgggagacttgatgatctcttcttcgaactccttctcgatgcgtcgctcttctctctgctccaggatcgcttcccgttcttcgggagtgatgaagcaggagtggatattgaagccgaggataactacatagtagacactgagggagctgttagctaactatttcctcgtaaaagggcagggagcaaaaaaaaattagggtggacggggtcgaactaacatcatgaggatggtcacagcaaacaacgctttggcttgcatgcagtatggaatattggactttttagaggcaacactgcaactcttcgcaatgtaccacggggcccctggttggggatgtcttgggtctgacgtgtcagacccagcctgatacgccgctgacacgatgtatagaattaccaaggacccgtggacggcgaccgcaacaggaggataaaacagcttcatccagtgagtaggcaatttcgtgatgaggaagaaagtgctcaaaacacccatgacaaggttatagtcggtggtactattcccagggtcagcggccagctcttgaacattgagtatagtgagtaacatacaagtcggaccaaaccatgggggccttgaatggctggtaattcgctgctgcatacagtgcctcgttcggggcactgttaaatccattgtctgctccatcttgccataacaatgtccggtatagatcgtgggaagcaatacccgtcaatgtcagcatcacgatggtgagcggaaactccccggccatcaaccaaagaacgatcctgtggtgcttatgcttttttgggaacaggagctgcattttggcggtgattttcgaacgatcgcaataaaaattgactctatttctcccaagctgaccgttgagccgaagcgcttacggtaggattaaagctgtgtacaatgcgatttggccagaccggctggctaagacattcagtctgtcgcacgtaaagggtcaaatgcttcagcgtggtagaaaagggcaaaaaaaagtagaagaacacaagtctgggcgacctggaggacgagcgctagatatgagctcgagaccaacgagtggccgaaggcacaagccatcgcatgcaggagggggcacgaatcagcatggaaagcccgtgcagagggattgatgtgtgtttgggaggtgcatctggccaatgcttgatggcggcaaagcgccagcgcaagtagcaagccggggtcatcacaccaatgagatgacggggatcgagggaagaccgccgctcgtcacacgctagacggtgtgataggatggcagatctgcatggagccctcatcacataattcccctcaacaggatcagcggaaaaccctgaccctccgaggaaacttgcagcttttcgtacgaagcgcctgcgaaacgctgatgtggggggtgatgtgaggtcgcatctgtgaccatgcaatgggctgtacatatacccatgctagccccggagtcaggaaaatgggaacaaagaggacggtccctcgtttgtgacagccatcgccgtcattattcccaagtcgtcgatttttaagggaagttgtcgagtgatggcttaaacggattacagagaggaagtcatgtggtcggcagaggaacgacaacccatcactggcttggtctcatattcaatagaatcatgccatctttcagggaattcatccactaaattcatccaattacacccttgtagcttgatacatatattgatctgtcttgatgaagtcgttgtccttatgttcgcttgttcttcgctcaactgttccactccgcatcacccggcccatcatccggcctagtcaactcagatttcgctccatttcaataactacagaacaaatgacttcccaaagagacgagtcacttcctcatgagctgcgcacggctgcagagccccggcaaaatagactatatccagtgcgactgtcgcacatcgagcaggtcaacccctctgtccggctactacagttcgctttgccttctcaagaaaataatgtatgggcgttgtttcttatgttttactcctctgtttcctttacatatatatcctatttcccttgccttcgatttacatattaagcccgtctatcaactcccaatgttgttgtccccgcgccgttatccatgtgccccgcacgccatgttccaatcacaccgggggatcttctatcacacacgtttacccaaagacaccactaatgcagtgtacaggataacaatcaacagccattcagcttcctccccggccaatggcttgatgtccatattccctccctcgcccaagcgggaggcttcactatcacctctaccccggcagatgccgaagtgctgccgtcaccggaagcttctacagactcattagctggcgaggcgctagaaccatcctcagaatctcaagggcgaccaccatatgttgaacttgctgtgcaagactctcccagcaacccatccgtcgcatggctatggaggccaagggaagagatcctaggcagggaactgaacatccgagttggtggaagctttgtctggcctcccactggaatcagtattaatgatgttaaaaatgtcgtcttcgttgcgggtggtgttggcatcaagtaagtgagacctcccagacatcatgtcccttatctccagggtgcacaaacatacaccagcacaaatcaaggcctcacttgtttcaaccccttatggaggaatcctaacacagtctcagccctctgatatccatgctctcccacctgaacaacaacgaacctcacacccccaacccgaaaaccatccacatcctatactccagtcgcctaccgcaacaccaaggaacaggctccgcagacgcaatactagaccaggtcctgtttctcccacgtctgcgccagataatccgatctcaagagagttcgcatcggctccgtatctcgctggaccttttccttacggacctggcttcatcgtctgatctgctctcatctgggtctccttcggatctcaagattcacccaggaaggatatctgatcatgatctgcgctctgcggctgtgggtacaggtgatgaattggattcccagggcacagtatgctatgtatgtggaccgcctgatatgactgattccatcgtggagaagttggtagcgatcctaggggatgatggagagcagcgagttttctttgagaaatggtggtgaggatggccagattgtaggcgatgtaagatatacacaggagattaattgcagagtttgttcgtgaatgaatattcagcgttacagtccaggctcacaagaatcagagcagaataagactaggagagatggcttcaatatttcagaaaaagacaagactccccgcagacgccgacctaatgcaggcaaggggcaaaaatatatgtacaggaaaataagacacatgtcgctgaacaagaacggaaacgacagtatgtgagagcaggtgcagtacagacaggctggcatctcgatacaagatggggaagaggaagagaaaggagcatagggagagagaagtcagacttcgttaggttgcttcctccgggctgttgacggtaccgccgtccacgatcatcatttcgtcgattttggcttcggtttgaccccattctagacgcttgtatgttgatacacgaccggggcctctgtcgaagtcgaagaaacggactcgtcgaacgaagtcatcgtagccaccgtacccacccagtccgacaccgcccccgtagcacatccagagagagggtttcgaattgtcgtcttgctcgagcatgcaatagtcattgacatgatcactagagaacagttagtcttcggaacgacacaaaaggaatcttgaaaagcatgtgactcactgtccacaactaacaaacaagacgccctcttcttcgagggcgtccttgaagccagagttgaaccctggtgcagtagggggttccatccaggagcccttgaagtactttcccgaactgcgatactcagggagcggaatgtggatgaatgccacgttcatgtggatatggttatattcctggtgtttccttctcaagctttgggcggtgttcttgaaccaccgggtttggctcggcttgatccagtcgtagcctcggaactgacgttcgtcaggggagtaggaatgtgtgtcaaggaaatagagggtcagggcagagtgtgtgcttttgccccaatcgaggacttcgacaacgtaattgccgactccgtcgatgtcttcggggccggcgactgcaagagagtaagggaggtcttcatatagagccatgagttgttctctgttcaggtcaccctcatcgtcgtggtttccaaagatggctgcgtaaggaatcttgcggtcgaccaaaagctttacagacttgtacagagcactttgtgcgtctggggcagtctcgccgttgacctggtcgccggagaataccaccatgtccggcttctcttcgtcaagaagtcgctcgacaaattctaaggtccgggggtcggcttcgcacttctggccagtttccgcttccgtgggaacagggtcacgacagtggccgagaccagtactcatgtggagatctgccagctgcatgactttgaatttcccgttctcgttgattctgggaacgggtttcttgagcttggcctgcggatgtcctcttcgaatactaagacgagtctccaactcttctgtccgactatccaggagaatgggagtatctttaacttcccagttgggacggggatcgacagcatccgctccataaaggacatcgacgtacgtcacagcgctttcggagtcgctagcatggcgggaggacgagcgcttgagccagatgcctcccggtcggggttcccacgcttcgatttcggactttccaacggattcagactggggagtgagacgactgattttcaagtcgatgaccaccttgtcatcagggcccaattcctcctcctttttccgcttgaactggacgtaggcactcgaagtccagccggagcgcaggtagaggtccttatcgacgcggtaccagctttctgggtctagcttacagctcgagaatggattgagagaggaacatgctgtgacggtcacatctgtgatcacgtatccggaataatgcgacggaagatggccatggattgaagagggaaggacactgtatcgattatcgagaatgacgacgacgaggagaatgaatgttgcgaataaaccgagctgtacactcgctcggacctacacgaattagtcaactgcttcgcagggagtcaaataatgtcatactagccggcgagccattatgagatagatatcaccctggcaaggacttgaagaaaagcgatgcgccctgtcgcatgatgcccacgaattgcaagagtatagggcaaaggagaagaccaggttcggtcaactctaggatataaaggacaggtataatttgttggaggattgaagttcgcagttcaccctcgacgcttggaccctgaaggcggtgactcctgaatgattctagcctttccaaggttcccccgatgtttgtatgttggtgattcatcaacttatcttctccgtatccttggattcttcctcttttcactgatattctcattattcttggctaaatttgtgtgaaatttatatccatcatcaatacatattcatgtgcatctagttgtaaagtctatacgggtctacctctgttctacaggccgagcgaagccttggcagccacctcactcgcagacaccttgccgctcaatatgtctttggaggtcgagaggattgtggaccaattctcgaaagtcgtgtagggcattcccttgcgttggcaataggtcaccagatctaccacagcgttagttcagctgtctcagaatctggattcaaaggcggatcgggcagatgaatacctttgccttgcttggcgaagagaagatcagtctctgcagctgcggacaaatcagaaacaccgtctcctgcgtacagaagaatcgggcgctccccgtcgggcaacgcggcataaggcttgatctccagggacttgtcatgcccgaagtggctggtgaatgattgtcagtgagctgagagagatggtgattggattgacagtggcttacctatcatcgtggtactcgatttgccaaccaccctcgctgttgatgtccttgccatcccggctggtgggctcgttggaaatgatggtgaggtggctggctggcttgtggccgaggaacttctccaacaaggcactgataatgggtcgcattccagatgaaaggatgacaatgggaacattgttattctcggcccagtggtagaattcctcgaagtacgggtccagcttcatattcttcaacagaatttcgatgcactcgtcgtacggggtcttgatactttcaagcatcttgcggaaggcatcactataatgaaagaagtctcattagacttgcttatgggatagacagtgttttaacactcaccggaagctcatagtctcgtcaaggacctggttgcccaacacaagacgctcttcccggccgaagccaaggttatcgatctaagtagtattagtaaagatctagcagagggtagcaatgccacataccatgaagtcattgcctgggatcctagtcagcattcaagtacaggcattttgtggggaagcacctactgtcgtcgactgtgatggtcccatcaaagtcggtgaaaaagatgagcttaggcttagtctccaagtatgggagagcgttagaacccatgatcgctatatatatcaatagaaataaatcgaagatatgtacagtccagagaaggaggaaaagcaactgagattaaagatgtgcccctcgattcggtgactgggggtgggtcgagcggtaccgcagcgggctagtctcgatcagccagattttccgttttctgtttattccagggctttatattgttctatatcatgtctcgtttgcgccaggccctgcagcccatctttggtgcgacaccaacaggcgccttgcgctctcgggcaattgacacgaatttctccattatcaaaggtaattgtgtgttgcaacgtttcttcccaacaccggactaacgaaatgcgcagagggagaccgagtcattttacacggcaaacagccctcattgtcaaaagcattgaagcgaggtgaaaagctccagactcctcgcggggcagtggaacatgacagcatcattgggaaacgggtttgggacacggttcagtctcgcaaaggtcaataacacccacttctcgatattccctgggcatgtactgacatttccgttacatacaggcctgaatcttcgagtcagccttccaacattagaagaatacgtcgccctgacccctcgcttggtcacgccggtatgcgcagcactcctacggatcacacacggagacacattggactcacgctatcccagtagatctatccacaggatgccaatttgattgcttcccttctcgacatccatgtcaacactcctgccgcgggcgaaatacaacccactacggaaatcctcgagtctggaacaggccatggatccttgacactacatctggcgcgcgccatccatgccgccaataccactcctccgcctcgtccatcgcgatcccagatcaactatctagaaggccgtgttaccaggccgggtgaaaaggacacggaacaagcaggagaggaacccgcggagcaaaccgcggatccagcacaggaagaatgggatgcatggcgagcgcagcgcaacgccgtcattcacacggtcgacgtatcaccgaagttctctgcgctggccgagaaaaacatccggggattccgccgtggaatatacgcaggcaacattgatttctacgtgggccccgttgaaaattggattgcccagcagaagcaacagcggaaaaagactggcctggcttcactgacggggggaaacccagtcgacccgttcctttcacacgttattcttgacatgccttcttcaaacttgagaatcccacatgttaccccgatgttgaagcgtgatggtctcctagtggtgttcatgcctagtattacgcagatcggcgagtgtctgcaactgatccgagaccatcgactgccccttgttcaggagaaggtgatcgagcttggctccggaatgagcggtggccgtatatgggatgtgcgttttgcgactaaaaagtcaggcgccgacccatcgtcttgggctgtcccttcagacgctgagggtgccactcctgttgaagctgatgagcagtccgctgcctctgatgctatctctgaggtgtccaccttagaggagcccccgaagggaggagagtctgtcttggtctgccggcctaaggtcggagtgcgtatccagggcggtggtttcgtggcagtctggcggcgaatcgaagatcggtaagatcttggtccagctgtcctaggcatataaatcctgtactatataactgtattctattgcatgtctgatactgactgaacgcatttgtaccatgtagagaattgtgacaataatattaacctgtcataacgatagtcataacgataaacagtcgtaacaagaaacagtcacgacaagaacaatcacctcacagctttgccttgccgtcggcccctgcatcctcatgagcggcagtgtcttcaccctcaacaccctctacctcatgctgaacaaccacctccttcgttgcaggcactttactcaaaacccaagccttcacatctgcgaggaacctctccgtcgtctcgggcaactcagcatgcaacttatgataagccccctcgtaaggacaaaacttcacatttccaccattctcggtgaacgccccaacgaagtcctgcaccgcggcataactagtaatgcgatctccatccccatgcccgaaccaaaacggcagctcactttccacccaagcctcaggaccagcggcaaacatcccctccaaaaaaatacctcgatccaacatgccagccagcccttcaaaagttcccgtatcatggcacagctcgtcagccatgacttccctgaccacatcctcgttacgagacagcaaactgtggtcaagcggggaataccgctgcttattggggaccaactttgcgacaactcgtcccgctgagactgtcagctttgaggggcgggaggatggatctatggcgatcagaggggagtacagaagcacgccggtgaagttgggccggttatatgtttctctgttgtaaggtgactctgggtggaaaatgtagttcaggacttcgccgccgcccatgctgtgacccattaggaagaggggcaggtcaggcctggagggtaggctttgcagaaaggagtggatgtccgacaggacttgggaggttgggcctgagttaccgcggtcgctggtttgcttgacgctgcggccccatcctctggtttcaggctgttagtttggggttcgtggtaaaataggccgtttcttcgtgggtaattatattgagatgtcagggctgggtttgggcttgatggttgaacacttaccgctgatcaaaagacctgacctcaacacctgccgatgccagtgttgaaaacagatcgtggtaggcattgcctagcaaagatttgtgtcaataaccttggaacctgttttgggtcattgttcatgatcgacatatagactcacagtggtcactgaagccatggataaaggccaaaacagcaagtggagacccgcttgtctatagagtagatcgcattgttagttctgaaggtcaatatccttatcatcatgtttgagtccatctcagcttattcggacagggaccaaagctgtgtcttgcaaattcagacgtaccttccatgtcttggcatacaggtcaaggccgtctggaagagtgtgcacgctttcttctgtgtacattgcggctgtcggagcttgtaggaaggctggagagatggctagagatatggctagagagatggagtgcacgttttaagcatggatatacgacacggaacctcggcaggaacgtcgggccaagatgcatactaacgcgatttagatccactaagctccaaacattgaattcacatttaaaccctatttatgtacacaaaattatatcctagcataactattacaaggagcacagaaataagataactacctacctataagatagaactaatacaacggggaatatcaagcatatccattttgtggacgttagctgtaggttcttcgcccctttggcctggcaacatttggcagcaacctattcgactgcgactaccctttttgttccttcgttttgattcatttctatgctaggtccaggattgcacttcccccggaaacccaagatataaaggtccaaggtgggatcttcaggtccgacttcggggaattaaatgggcaagagcctccaaagatccatgggtctttcgggcccactttccataatttgattggttgtcagcaagctaaaccttatccaatcaaagtttgttcgtgacatgcctctcctatatcaggtcaaaattactgtcaaattcttaaatgttttgttttcttttgttacctttttaaccttgggatctatgttatattactttagacaacgagtgccctcgatacttaggccagcaatctcacaatctctgctgcgccccaaatattcaggaaggatgttctccgccattcctcaagccgatgcctcatatcggactcttgctttatccccgagtgaagatagtccagatatccgccagaaatatcgaccattcatccttgacgacaattcaactgaggactgggtcaacgaattagacctagccaccgcagcggacatggcagaaaataacctgcgagttacaaaccagagactgaaagtcctggtgctctatggaagtcttcgcaaaaggtcgtattcccgactggtggcattggaagcttcccgtatactcttccggctgggatgtgacgtacgcgtctttgaccccgaaggtcttcccgtgaagaacgagattgataccgcccatcccaaagtacaggagctccgagaactcagtctatggagcgatgggcatgtctgggtctcgcctgaacagcacggcaatctggtgagtgaatcccggcgatacacttagcatttaatgcattatttactaacgttctcttccacaacgctagaccgctgtgttcaagaatcagatcgattggattcctttgtctactggaagtgtccgtcccacccaaggccgaacgctggccattgcccaggtgtgcggtggatcccaatcgttcaatgcggtcaactcgttacgtatcctgggtcggtggatgcgcatgtttaccattccaaaccagtcttcaattcccaaggcatatacacagttcccggacgaaggtcaaccggacgatcaacgactcatgcctagtggcaacagagaccgtctggtggattgcatggaggagtttgtcaaatatacaattctgatgcggcctcacatcgatctttttggtgaccgttttagtgagcgggaggaacggaagataaaggaggcaaagctgaaagctgctacagctagctaagaaaaccaaattaggatagaatagaataacatagagtgcgtcagaaagacaatgtatcctggtatacttccaagttggtcaaccttaatacattgttacctcgactagcaatttgcccaggtactactcttccaactaaggcccacattcctacggaatcttgaaagatatggaggtcggatagtaccgttaataaggtagtggccaatcacacgaggcgagcgacatgctaacactggtcttggctactgtgcaaaatgatgcaagggctctctggaagcgttcctcgatactaactcaacttatatctacaaaatattcccatcatctgctcctcctatctactccaccatacctccttttcgatcccgcccttggcctctcgtttatcagcctcaatcatagacgaaaataataagaatgatcccagcacggtaaagtcaccgcgtgactttcttgacgtgtagcttacgctactcaaaggactatagcaggctcaatttcccgcgtcgagctcctccggtggtttcacgagggcaagaggatcgggaaagattttgttctagttgacttacgccgtactgatttcgaggtacgtacacaacgttttctgccgcccatatacagatcttataataagtatatagggaggcacgattcggggctctctgaacctcccatcgcagagcttgtatcctactattccgactctatattctgtcctttcgcaaggtggaatcgctaacgtagtgtggtattgtggtcagtgtgttttggtttcctcgtcaagattatttcaacctaacaaaagacacaggctcttcccgaggtcgtggggtgcgtgctgcgaactggtttgcagaatatctggaagagcaaagggacatgacaataaagagtcttgttttagaagggggtattaaggggtgggccacagctggtaaggattatactcagcttatggatgagtatgatgagttgaaatgggtgaagtagctctattgtatcagctagcatccctcggagacgtttgaaatatagtcaaggttctcgacgaggtaattacgtactcgcggggctttcctccatccgcggatgtatacctagatactagtgagtatcattgaatagtaccaacctgtcccagcggacaggctcactcataggcagcgcggaactcagagcgtagctcctcgagcgcgaagcgactcaagctccagaagaattccttcgtcagaggttccccggggacttttttccacacgaaatatatgagtagccaccaggagggagtccgtgctctccttgtgttttttcttggcgtggcccaggaactgaggaacagcgggacagccttttaagagcatgagcgactctagctcgccgtacacctcaggtaaaacggcccgttgagctagtatgtcggggtccgcatactccgttccagcgatcgggatttgatggtagatccgcataaaagctttcagacctgggtggccttctaggtgacacagaaacttgccaacggtgatagaagccccgcggcccattttgacgaagtgatgaccgtagtgcctatgaggcggcggagtaatcggtcatcaaagcaactcatcgtaaagggatgtggcaatggtctatgatgcttcatcgctgagcgacaaataattgtcttagcctacctaggtatcccaatgtgggtccatctgcagtactaaccccgatctggtatagttacccgtgtgggtcaatcagactttgttcgatctacacccgagtacttacctagggccctacttattttctgccggaaaaacttcgttcaaccagcatgctatgtgagtgagtcctgtaataataggaatagccaggcggtactggtagagcggtcaatggtagaggtagtaatagtaaactggcggtatgataatcaaaatctaatacggaaaaatacttgacgcactggcggcaatacactgccgcactacctaggtatacacaacacgagaattattcttcccgaccagcctcaatattcgcttctataaaggtttgagagtcttcccgtagagcaagttttagggatacctacctaggtagacaaagaaagatttcgaatcatatgttaacatatttttgtcagctatttgttgccaacgtagcaattttcgcacaaaagcatccatttgcaatatgtgctgaccagacagtgtggtcactagccctggagggctggtcactcctgttctatcatgcttcgacaatagtctcctgcgtatttatatcttcattccccccagaagctcgcctctagctacatttttaagaccttcgatactgattatgggtgatttgtattaaaggtactgcatagtttatatgcaaacacagatagtatgtcaagttcataatctagtcgaccagaataggtcgggcaagctcggagtcgaggtcggaatccgcggaccccgagtatctcaccttgtcattttttatacagcgcagtcacacccatcccttctaggagctttgcgataaaattcaaatcaaaatgtccacattcaatggcttagaaataacaacagcaagtcctcccatcaaactcctacctagtaacccagatctaacccgaacaggcatcaataatcgcggcgctggccagcgaaggtgccatccacccaatggacacagtaataacgcgcatgcaatcgccaatgtacagcagcgtctacaagcacctaaacggcacactcaatcgcgccctcttcagcgggctgtaccaagggttcggaccaacttttgtcgcagggacgctgtcatcagtggctttcttcacagcatacgaggcctcaaagatggctttcgacaatgcacagtccgctgggtatatgctcggcgttccacggccgctgatacacgtcgccagcagtgcggttgctgaactgcttgcttgcgctatccagaacccgggtgaggtgttgaagcagaatgcacaggtttttcagcagccacttaatgcccaaagaggtccgtctccgacgatggagatgctgcgtcagttcaggaagtatccttctggcctgtgggctgggtatactgcgttagtggcgagtcaattaccgagtatgtgtcttacgttttgtttgtatgagatgtttaaggagaatttgcttgagcggtggaagacagagaaagatgatatcagacagcagcttgaagcgactgtcttgggtgctggtgctgcggggggttgtgcgtcttggttctttgttcctattcacgtggtcaagacgaggatgaggcttgcggttggtgagcaaacaggcagcacccagtcgagtctcaaggctgtccctggtttatcatcccgtatcggtgcattcgctattgctcgaaatgtgctgcggaaggagggggtagctgggttgtttcggggatctgttttgacttgcgtgacggcggttgtgggaggtggactctacattggatgttatgagggggctaagatatacttgtgcaattatcaagcctcgtagttggcacggctggggattattccaagccgaatgtattatatgatatgtgtaatagaatagaatcactctcctccttccgtctctttcgtcatatcacagagtgaagacccggtatagtgtgagatcctataaaggggacgttggatgtctgggctgttaggctacctacagggacagaacctaagatagatagtcaaattagtgcctcccttctcctcccaatcatagcaatcccagtaccttgtttcttcattttctgaatctctatcgtattgcaattgtatgactcgcaagtgtgattgatgaagcccggcttggctaagactctgacttagcaaataaagacacgtcatctacagtatattttctgttaggctctatacgcctatgtagttaaggttcagcaacccggtataacactaaaacgggaaaatatataaccaaagaaagagccaaacaggcacgaaaagacacaacaactataggagtgtggtcatacactttaatataggaaggaagctaaccctggaaagccactaactagtattcccactatgtaaatatctatactctccaacaagaccattcacatcggtcaaaaagacgtcaaatatcacagagcattgtaaatgtaataggaccagccacagagttgtatttctaaataccacttgtccaatcactgacatatacataagcacagatgtcacaacgataccgtcatccaggagcgaaaagaagtaacctgcaattacctcgactataacaccttaggggcattgcggatgactgagagagtgctgtctgggacgtaatcctctgcaacaagcttctcagtgtaatccagcaaccaattttggcaatttggtgcctgtattccagtcaaaatctgcagcaataccaatacccaagagtacataccgataggtcaaaaggattgggactacgactaggaggctgtaccgtggtggcgaccgactcgaatcgatcacgggcaatggtatctcctatctctttgttgccgacggtatcctttatataccgatcgtccacttgcgcgaggggaatcagttggaagcttggttgaggggcgtcgaagtcgtagttgcgcctgaactcaaggaagaacccctgggccggattcccagtcacatggataagttttccaacgtcccctgtgtcgcaggtcgggatgtaaacagcataatgggcaggttgcgttccactggaaagaacggcgaggtaaatagtgcgagggatctggatacagaaaagggaacgaagaagatgtagtggatgtatacgcaacagagatagtttttataataggtttgtctgattgtgagtatgaaaaagaggacagagaggtggttatcaatggatttatacaactcatcttgctaaatattttccttggtgacaaatctcgacgtctgcgcgcccaaaagccccttgtgaggctgagcatgctacggctgagagcgcaccactacggttcgagaaggagacgcccggcacaacgtactcttgctttccaaggactagggtagctcacactttagatcacaaccaacagattagagatgcctgcaataggaccgagcgcgagcaggggctgactgatacctggccccccgggccgtttccgtgactgtgcgttagctcgcgcctcactaggtgcagctatccaaccattccctgctagattaacaccccatagccgatatataccaatcccatggatccgcagtgctcgcgtattgatctaggatcattggtaagtatttcgtcgaccactcctccctatgaaaggcagtgtactgcgctttgcgggcctcccagtactcaggtagccagccagattgctcccagtcgacgacagccaggagacggtatggcttagaaggtgttagaataatattgctgcgatggaggtcgccgtgggtgaacttgatagagctatcatcaaacagctcgtgacgaaatggttcaattggaacagaatgcggatcgggcattggtctgcgagggaggaatgtgaaccactcatgaaactcgtggactgaagtgaaaggtccggcctccgataggtaattaagatggagtgctctgtcataaagaggagatcgcataatattgcctaggaaggagttagatgtataatggaataatctagaaaagaacagttagagagagaggtattagggcggtacaaacctatgaatgtgtctgaaggatcttgtttaagctggcggagattattgaaagctgtccggagctgatggcagactatatcacgttcattgtgttccagcgattcccaagcttcctctaaagtccgtccacgcatatattgcatgtaaatgaatttctcatccctatctgtgcgccatccgtatacttcaggaactggtatacggccattcaggaaacggtgtatagcatagatagactgggcctctgatatccccacctgaattccccatttcacaactagccccatgtcttcaaacaccgccggtggtggtctcacatgagccccgccgtataagaggcttctgcgcttgtccagactggtccctgagagccattgtgcttcggccttttcccgaacttggtttggggaaggtaactcgctccatttattgaagaatgaagagtctttagcgtcaaaattggacgcatcagggatcattgacggtgtcagccggacgcgtccatgttggttaatcagtattgggccgacaagcggatcgtggataggaaccgccatgatctcatgcaaggagagggtatctggagaactgtaggaagaacctccaaaataaatatgagtagcaaaacaagttggatcaactgagttcagaaatctaaattcaagggccatcctgcctaaaggtcatgtgattttcagcaattcttacctgtataccaacggcaacaatcagactccgttcccgtcgaacagcatcctcttgggatgcgggcaaagcccccccgtatgttcgatacggggccccccccgaatcggtaagtgcctacggctcacggctcaccgattctctagcaatgttagaagagaatcgaaaaaaacacgctaacgtcccgtaccgtcagacgaacaaccactttgagtggaaatccttcacaccatcatttaaaaaaaaaacgctttccgactgaacgttagtatagaacttcaaactcaactccaaagaaactcacgtgaaataaatcacagaataactctcaaaataactgaagttccttcatcacagaccggcaccccagctgccgctggggccccccggaacaattcatcatcacccaagataaaaaaacgtattccaaaactcaccgtccgactgtcagtgcaatatatcacgagaaccataggagagagagtccaaggcatcatacgtattacaatagcacgatgaacaagcttgtacccaagaccatagaaagggcatccttgttcacatttaccagcaacgctgctgatgggatctacaaaagaacaccaaagactgaaaatgaacaaagccatgctctattcttgattgagcctcgcataggacgaacggcgcaataaacacgtacatggaacagacaaaactccgttcgcctgaaagaaacaaaagaaagaaaaacgcaaagcaacctcgtcacgggtaaaaagcagatacccttcaccacctgttccgcccgaacaccaatcccccgatcctaagcgtcgtgaagccgtctcagatgaggttagagattaggtgaaatgaaaccgagataaatcaggaaacttaaacggaagacacagatgtagtggggttgagacaaagggggtttggaggagagagagaacgccagggagtaaatggagactctgccaggctgtttcactacattcaacagacacaaggcaagaccattgttcgaggaacaaacctctactccgctagcaactcaagagaatacagaggataagcaagaggaaatggacgttcataagcagggaaaaaaaacacaggaaagaagaaaaaaaaacgagatacgtgaagaaacaccataagacggctggctagagagccaccacccaaaaagattccgaaaccacaagcaggaaagaaaccggttggaaaaacaccccatctccgaagatttcaaatgctccacgtcgttagtgccgttgtggcccaaagtctgcctctaccaccttgcccttcttacccttgaccgtaaactccgcaagcaacgcgacatgatcacttgggaagtggaaattcgggaacccgggcacgcgacgcaggtattccttgtccacttcgccgagcaatgccgacacatggagagtattcgaagagtaccaaacataatcgagaatggccgtgaagtcggaagtgtagttggtgaagcttagttctcccatggaggagtacgcggacttcaacttaaagggatgcgtcataccaaccttgctgaggtttccgtagagtcgcttctccagatcgggatggtcttcgggaagtcgcccagtggagatcaagttgtaagccgcagaccccggtgaagagttgaaatcaccacacatgagaacagggatctgatcgccactagtgtactccatcgagggggccggttccacaacgggcgtggtctctgagccactttcggcctctgagaagcgaaatgcggtcttgtctgtgcaggcaggccacttggcgtagttatccgagagcttggtaatctcctccatcagaatcgcagtctgaatgagcttgacgtccttgaaggcaggatcccaatacagatgagcattcacactgatgaagcgagcaccggtttgccggttttccaggaagaccacaacggcgatgtgatccttctgccacagtcggttgtagatatcatcttggcccttggcgtcaggtcgacggacggctgtctgaccaaagttgatcaactgcttgtccaataggatgtacttgcttcccttgaagaaggtagcacatccatcgaccatgcgggcatcttcctcctgcatgcccatcgcacgaccacgcggccagtagacacctttgtagtcattgtatgcaagctgttcccggaagaaattgttgtagcttccctgatcaacctcctgaaggcagacaatatctgcgttatgggatcgtaattcgttaagaataagctcgcggcggaattcccaggacagaacacgtgagggcacatagccataatgcgattgggttgcagaagagtcgcacagggtgttgtacgacagtacggtgatcttttccgtattgctgttggacgaggtggaggtatcatcgagaatcacccagtcacggtcaggaggaggtaggtgaactgtaatgaagttagcgaaaagtcccgcgcaaatatgcttgagagcgggattagcatttgaaacgcacccggcatctcttctttcaggtacttgatgagagctttggttccgtccttcatgatctgagatttaaggacatcgttcaagggattgccctcgatacccaaggtttccagccggtaaaggtaccccatttcgtaagggagggtgcgaatgttgttatcgaatagaaggagtttcttcaggtttgaaagcatgccaagttcttctggtagctccgtgagttcgttgcccgacagatccagatggttcaacttccgcaattgtccaatagccgggggcagcaccttcaacttgttagagttgaggtacagcttctcaatgaagccatagttgaacaacgaagtagtcaaagcgcgcaatccttggccaccgaaatcaagcgcattccaaccctgtcggctagctggcttcgccgcagatgcaccatttcgcccatccgtcccattctctgtgtcagtattgctggacatgagctggattcctttcgtttgctgcgcaatgacgcgggcatggtagtgtggggaagtggcttgtctagactccgccgcaagctggagctgttgctgccaatgctcgttcattgattcgtcaatatcatcctccgcggtcggtactccgttctgcagatgagtcgagttgaaatgagaagtggtcgtagtggctagtgcgccgccggggaaattgtgttgatgagtgaggttgtgggtggcttgtgtgtggtgggcatgatgatgcggctgctgtgtgtgatgagagtggtgggtttgcgactggaacttcgggatcggcatgccaaaccgctggtgggcttgaccgccattcatcatgacatgctgaccttggtgggcttggccgtacatgttgttgaaggaactgagagcagcagcctggtttagggcaggagatcgagagggggagggggtgtcggggttgaatttcagtcgacccgtcggtgaattggtcccgtttcgaacgatgtgccgctggtgagggttctgctgtgcttgagcttggaagtagaactgcccggccccaggctgctggaacctgtaggtaccatctgccatttaacgtggcagacgagaccgtgttttgtttccctggtggaaaacctgttggttggtgggcggcgctaagtcgagttgggtcgaggagaggagaggagaggatcggagacggtctcttctcttcttccacatagaggcctaaggcaaaaccacctgtatcaaaccactattgaaggtcgccggtgactttggcactgggagtatctttaggtgtgcaatggttgcggtacctaagggcggagattgggcggaagggtcaaaagaaggcgtgatcgtaaaagcaaaaagagatcgagtgatggggagtcgaagaaaaatcagtggggcaagcttgacgtagcaaagatgagcaaaccagacgattgtctccaggtcgatgaggacgtcctgagatgacactggtggtttgcagcgaggcgggagtcacgggatcacgtgaatcgccgcaagggccaaagtctttcccagctttgatgagcttgaattgccaagacacagtcgatgtctctcaataattgggggggttttttgagagaaatctttgaaatagatcatatatccttcatctatcttacagatttatgtcactttttgcaatggatggggctgtttatatgaaaaccacccacgtggtcgactttgcttgccaaaaccatgggcaatgcaactgtctttggcaagtcgaacctgcgttggattttgattctgcctagacatttgtttgaaactagccaacactaggggtaacgtacaatgaaagaaatctgggtctagaatagagatatatacatgtagctaaggggtccagcaaagagaggaagagacccgaaccagaagattgaaagaatgcacaatggcctgatctattctaagcgctaataatatccaatactttcaaaactgagtctggtattttgattttgtcttatgtgtagggaatcatagaatctttgtgtcaaagtagttcaggtcaggcttcccccttggcgcgaactgctcgggcgagacagaaaagccactgacggactaattgaattctctaaccttggaagcttggaatcgtatgacgaagggcaagaggtaaattatattcattcctaggtagtcattagtgaaattacctaaaaataccatcctaacaatattatctggtatactaagtagaaagacccctattaaatgattcttagatataggcttaatataacttcaatcgtgaaatgctgtctagacaagactattaaagccctatgttggagcgaatacggagtatagagatacgacatatgcactccgtatcgttcagatgatatgtatctgcaaggtagcacagacctagtatactcgcatgttcacaaaaaggggtctaacggcttaatatgcaattcttctatgttggaatacacagttaccttcctcttcttaccgatcatattcgcctcgtcaactccgtctatttccgtgttttagaaaatcaaactagtcttaaccaaagtacgtggcagacgctattgcgtcgatcgaattctcgtatcattctgcaggtacgtttaatactgccgagcggaaagggcacggatcacagtgcagactaagactaagattggaatcgccgattaccccaaatgcctgggaatttagcgttgggcactaggtaagtaccaagtatcagatagagagacaatggcgagctaggtctcagaatgtcggtccagactgcggacccaattactaaaacactcggtacttgatggatattgcgggtagggatctccgacggttgtgtatccagttttcgttgaaattggatgatacgtgcacgtctactactagtactttgtgctctgtacaatttgctttacttttggatgtatcttatcaaagtactccgtattggcttaagttattaggatatcttttctatatgattttagtggacccctgaaaatcgtgtttcaatattccccataaaatgtcaaaaagcaaataatgaactatgcaacataccacaacttctatagtttctaccgcatttggccagaatttcccttttcggcgagtgaaccatgggcactgatataagagtcatgatgtcaatgctatataaaatcaggaatactttcacgcaagagggtgaaacagaatacatattattggctccaatccaactgatatttcactacggagcaaagtactgttaccgtgaagagactaaactagactcgagtggatattcaacttccaggggtcagggctttttttcttctttccttctcccccatttctttctcgaacttctcgaataatttacttccaagggttataccttgtatgcaaaactacaggactatctacaatttaagtcctcttccttaacgttgaacaagaattttcttcagctctgcgccccggctgcactagggataatttccgagcccgctttggtccccgtcacttttcctgttcgactctattttttcgatttttctattttaattcctatttccctcggaattatcttccactcgcaaaaaaaaagcctgcaaaagaaaaaaaaaaagcatgcctcgttcatgaaaacttcaatcttgcgccgagaatgcgaccgaacccacaacccatcttcagagtcataggggacaccaatcgatatacttgagaggaaagtgatatggacataatggcactgggattctcagccgcaaccgcctccgggtccgacctacactccaaccttagctcgacactggccgcctcctcctcgtccctgagttcactcacggactactcgacataccctctgatgcgccagggtgaccgcacctactttcgcgacccggagaatgtctacccactgccctgcgacctgcccgagatccaccgccaaagcctgcgcacgtttatgttgctgcgcgtgctcggcggcccattttgcaacccccacttagccaatcggccgcccaaacgcgtcctggagatcgcatgcgggtccgctctgtggtctggtctgtgccacgactacttcacccgcagaggccatcccgatgtggcctttgccgggatagacgttatatccattgcgccggatctgcgcaagcagggaatgaactggcaattcaaacgtcatgacctacgccgaccccgcttgccctttccggacaactattttgatttcgtgttcattaaagatgccggcatgtgtccttctagtccggcgcaatctgcatcggggttgagcgagcccctgcgcgtgctgaagtccgggggtatcctggaggtgtgggattcagattggagcttccgctcgctcctgcctaatccggctccggcccgcaaaacgagctcgaaagaacaggagatcgccgatgcaacggctacttatacattttcttccgccacaccattcacacgagcacagaacaagttcatggtcgattataactcctggttggagaagtccttcgaccgtctcaagttgacggcgctcccgtgcgcgacgatcggtctgtccttcaactccgaagtggacttgttggaaaatgtcgacagtcgccgcgtcgcaattccattgggtgacttgcgctgggagcgagacggccaaatcaaggattccaacggccgtccacgaaaggccctgactccagagcagatcgccatccgacgcacggctctcctcacgacaatacagatgattgaagggctggagccaatattgatggaatctagcggaaagggtcgtgacgaatgggaccgatggtgggctgcaatgacagccgacctcttgcagaaaggcggactttccagcggcgagtgccttgaagtaagcgcctggtggggtcaaaaaaaatgaaccccttgagtcaatttggagttccggtgggcaaaagtcaagtagtgaccgttctgcactttgtattggtgataccccaattttatttctgtctttctgggtttctaacatgcatatgatctggacatttctggagaagaagtgagagccgcgggaatatcaggcctcgcttccatatcgctttttcagtgttcggtaccgcttcaaatagtacctggtttttttttcactttgttagtcgccatcaacagaaaattcttgcgatgggggtcaaaatagttcttgcatgatgccatgataatgaggagtcaatctatgcccagtgtatctagccagacactaccccattatgggtgcaatgtatagaagaatgacatgtacgaaagattccactgtgcttccaagtgattgtaatacagcaatataggaagtggttggatgcgacaacccgatagaagatagggaggaaagggaggtatgtagggaccagtcttacagcgcttccacttctgcattaagcaattagcaccatatcctcaactgcacccgagggataggcgtcccagcaataaagacagaacttacctttcttcacaaactcagccctcgctattcccttgcggatctgttcatcgtcggtgatctgtttctgactcgcaaacgcacggtgtagtcgatcccggaaatactggtaacccagaggatattcccgtcctaagaacagaagctctgtatctcgggatatcagcatgtaacagacgactggcttaagaccaaagcaaaggaagccaagttactgcgcgacgtatgcagcttcctacctttgtagacgttgatgacctgccggcgcagctcgggatttaccattgttgctccatgcaagaataaagattgttcttgttgagagttggtggtggagatgcggtgcaatgaaggtaagcggctgagaagcttccaggcttcgggagttatcggtgacgtgactagcggagttccaaggttggattttctatacccgatatagttactacctacgtacgtacttttagggtaaattcgcatgttttgtttctcaaatgtaaatccaatttgaaacaagtttcaaatatgtataaaataatatcaatacaggatcagtttcagattccctatattcacgcggggttctcgccgacctcggggtactggcccaagcttcatgttatcggttatcggcggtcgaagtgctgaatccaacattggaactatctctccacgacaacacaacatgctccctaagtcggctttcccagcgcagctgtctgcctcgatatccctgtgctccaatggcacacgtcgcctcttctctgcgacttccccgacaaccttcagccaaaagctccccgattcggcctcaaccccgatcaatccacgatggctcacaatgaccaagcgaagggttgggaagtgcatgatgtttgggatgaagccatctcagattgacgaggggggaaagattctacaacaattggccaaggaatggcgggaactggtcgctggaagcgagggattcctcacggataagaaacggcgcagtctgtttcgccataatgtggtctggggagaacaggtatgagcttgggctataatactgtgtctgtgctgtgagtgagaatgagagtgactaatgctaagcctgcttgttatggattaggatattatggtgagaacattcatccccctagcttttgcgcttacttcatgcgctgtcttggatttatggaccaaagctaaccgggataatagggtatgcttcgtccttttcctttgattctgctattcccatgtatggaccatgccatactaactagagcaaggtcacgtcaacaacgttacctatgttcgatacgccgaaacagctcgagtaaactggacgcgcaatatcggtaactatatcgataccgcaaataagaaagaatggataaacatgcttggtagtacgggaatcgggctcatcctgaagagtatcaaggtggactacaaatttgtactgtatcccggacccaatccccacaccgctagagcagcaaatgagtggacctacttacttacttactatcatgcagcccatggaatctccagacaaaattactgtttatcaaagactgatcccagacccatctgggcatctttcatcccagtcggcattccgactcgaagttatgatcttgtctgaagcccaccaacgccctgctgcccgttgcttcgaggatatcgtgatttatgattacaagaagaaccgcaagactgtcaacatcccgccctttgtaatggagcagtttgaggctatgtggaagcaacaggagcaggagaaggagaactggagacgccggattgctgagatagagactcgtgtgcggaatcttgagcttaaaagctgggatcgggctgatgctgtggaggacaacgggtctgcgtgacggtgattgcagtggggtagaaatattgaagaactggttatatggggctgtggattactatgtttccttgtcattctttggacgctgggttgacagctgcagtctttgcgctttgtacatacgcattacagtcccaagtacgccggactgacggcatctctggcgaggaggggaacatggtcatgctgttatagtagcagcggcaatgaaccgacatctcattttgaaatcggtataggccaaattgcttgggacctaaacccagttgtaagtagtgcaggatagcaccggtgggcttcaaggtgacattgtgtatgtactagtagttacctgtgcctgacccgtgacagcaaccataatgcatgatccaactgctctcttggttgttcccgggtctccaacactgaattacctgttattctactgggctgcactcaacagccgggtgcgtgtatcatcgatgttcttcatatcgccaaggaatcattaacctatggcgcagtctatggcatatataaaatgagggacacgtctctataaatcaaagacagtaaaccacctttcaactccaccggccaaaccattcaaatcttcaacctctttgcaatctcaattccctctgcaatggatcccacccgggcgtcaatcgcatacccttcactctccaacctttgcagctcagccgacagctccagcaccggaagcgtgaaacactcaataaactcattatcctcgagacaaggctttggattctgattttccgaaagagacatgtcaacctggacgtacaccatgttgaaattggcattgcagaagccgggatctgaataagatatctcaggtcagctagtattcatcagtaagacgaacaacgggttcaccaaccattgtacatgataccagtagttttatccgcgacgccgatatacccagtctcttcttttaactctcggactgcagtctgctcgattgtttcccctgcatcaattaatcctgcagggagttctatgacgacttgatcaattggaggccggtattgcttttccaaaagaatctcggatccattcgtcttattcagaaaagcgacaatgttgactccatcgactggggagtctgttggtctggtctacgatttggttaggtcgttacagttcgatatatatatacactcaaaattcgtacctggcgctcagcggactcccagtctctcttgactccgttgggatcgatatagtttgtcttgactagtcttttccacttcgcttcttgcgaagtctaaggtgaatggccataagtagctgagagtatacacaggctaggaacacataccaagacctctcgtgaaaggaacgtggacttgcgctgtgacattttaggtattggcccttcggctctttggaatgggaattgaactgagagtaactgtaatctgagcactaggttgtaagaattgtcctattgcaaccttccaaggtgggcatgtgcccgcgggcccgcccgcgggcgggacacaagatgactaatgtggtgctgcccccagccccggggcctacctgcagaggtggtgcctacctaggctgacgaccctgtgagggcgaaattgcactgatattctaaccgtgactcttaacaatttcatatcgcgactacaagtcatctttgccccgggggattctttttatagaaccgtgttcttgaaagacacttcctaagacggcatcgctgttcaacccgtggacatccacgtatgtatgacaattatataaccgcacatctgttcgaaggttctcggtcgtatgttttgtccatttatataatgggatcaagcattgtgccgctacccgtgacaatcacacctgtggaatccgggcgctatcattgcttggagatgtcgaaaaggtctatcctggacgtagtccgggagctgatatccaatctctttctactagcgaagatcatcttggagggaagaagatgagatacttttgagcggaactgctggccataccgtgctcggcagagtcactgacacatattggggtttatattgagtccagtcgtgttggagacgtaactagatagatggtttcaggtgtagtaataattcgataaccataccggttaaccttggaaaatcagtcaaaccttggaagaagtcttggttcaatttaaagttaacattatgcgggggatggaatgtgagtttcgggtcacttttctcgtcgaagtatacctaggtaggtagtgtttcacctggcgctttattgtaaagaattttatctatccttgttgacttcttgaggatttatgtgcatatggtggctttctttctctaacattcctacagtcattacagtatgaaaaagagatatgcaatgcagatatcccgtttcaggcaccttaagcggaatttgagtatatgggccatatctttttgatatacattccatgagatatggatatacccgtaacgtataaatttgcccttatgttcctggtggtttagggcattcttgccttttacagtaatccttttagtaggccttttagttcaattggtttacgccctaactagtacatatggcaaagtgaactctagaatgatttgccccgatgaaccacgtggttcaaaaagactcaattgttcaattgttcaattgatcggattatgttaaagccccgagcggatattcgtaggagtgagtgcatttagctctttatagagaccgagaaaccttcataagattagccaaggtttgatatcaattattacttcgtacacccggagaccctgccggaccaggacatgagagccggaaccagtaggaaaagcgaaaggatcgaccataaaaacccgaagtttatcggacccaagcaaaatccggttctaaaagagactagggcggacacgctagtggaagggttcgcaattttcagaatcatgtaccctattttgtgaaatttggaaaggaaacttggaaaactggaagtataaagagccaaagaagtgcccatgtgatcgaggggtgtacaatatgtatagatactacaatggtagggctcaccgcatgcataaaaataacttaagccatcaccaagccggccgtcgggccgatcgttactaagtttgtggctgatctacagaaccctccagggctgccaagccccgggtatcgtattaggagggggaaggatcggaattggctggaaggagtaaaattacatttatcttctactcgaggatatcctcttaatagtgtaaatagaaatgtattttgcatcagtctcgatatatcatcgaacattaccttcttgaagatgccatactcgttctccaaaatctgtgcggagcccttcagaaagctgcacgagatagccgagcatgtgatgattccagcaagaatgtggtgaacagtgttgatacacaagtttgatacgcacaagctttagttccccatacttactccttcagatgctctccatgttcggattgcgtgttcattcctgcaggcgcatctatctgcaagcgagttccccaacgagtaataaccacaccatgatctaaggattcgtaacacataccataagtccggcgcaaggatgaccccgcagcagacgggtcaagaaacggtcgatcgtcaatccaattaggcagtttgacagcaaatagggactggtgatctcaacaggcttccaaattgatctgtacatcgtaggttgtacttcatactccgtgctcactagcttatcagcactagtcaagcccgttttgaagaaagtccgcatagcgccgaggcaacgggaaccactgggtatccgtaaaattgtctggataaaacgaagacatgcttaggattggccgatgtgtaggtatccgcgttgcaggacttggcaattgcagccgttgtagctcttaggcgtgacctgtcaataagccctagagtaggtatcgtaagatagatgtttagaagagaacggaaagcttggcagtgctgaatgggacttttcatgcagaaactccagatcgacaaagagagccagaatatattaccaggagctctctctctctctccgaatttgcaatctgccgtccaagtacacagtaccgaaatgaatagtggcgaatggtattgaagccaggtaccgcctacccgaaaggcaccagagatcgacaccaaatgacagtaccaataccaattctgtttctttcgacctcatacaattccacctgggcactttttccccttcacgcttccacgtacagcgtcgtctcttgtctttctctctttctctcttttttccttatacatctacttcctttttctttcccatcttcattactatacaagccaatctgcaccatttccttcccccaccatattcaattttagtcggttttcgcctttttcctggtcccagtccttggcttcatcccgccaagctgactcggacctgggtttcgggctccctcttccatgacacgctccgctgcatctaggaagaaccagagcaatcggcaggagaatggccttgtcggtcccggcaagaaagtaaccaagcaaaagtcaagcggccatctgaatggcaactcgggcaacggctctgctaccggtccgggcgcgtccactcacttcgatttatcttccgtacggtctactagcgatacggccgtaacacctccgacagtttccggcaaaggaggggatagtacgaaggcagatggcaatgtgcgtgggatgttgaatggacatagcaagggtggagaaatggcatctgcgcaggaaaacggcgatgtcacccagaatggtggcatagcaggtcatgtctctcgcagcgggaactcgaaacgatccggatccaatgcttcgattaatccgctccagctcgcatccactatcctcaaatcgtgccccatgtacgacaccatcgccatcttgatttttttgctacagcttccaccgatggtcttgaccctggttcagttcttgttcgcctcgttgactttcatgcctccgagtggcgccgcggccggttctttgtcgtcgaatttcgatattttccaaggtccggctgggacgccatctctggggacgatgattgcgatggatgggttttgcatactcctctggggcctcttcatgtggacctgggcgcaaaacttcgccatcgatctcgctcatgtccaagttgctatcactttgggtggcgggggttccggaaagaacggcggggtcaatgctctctgtgtcggaattgttctgcttctccatcttgttcgcagtaaaggcatccaggactttgtcttgggtcatcttgtctctgctaaagtgctcagtcccgatctcctctcccaatattcgcacctgctacccgccgagttccgacgctccgaagcacaaacgtctccgagctggctccgaagccttcttgccgtgcacatcctagcacaagcggcgaccgccatggcacgacgtgcgatggccaagaatcggtcaccgacaccgttacgggccggcaagcggggggatacggaggcttctgcggggtcacagggacaagccgattctgctctggagtctgctgccagtgtttcatcttctttcgtggggcctgatggtcagttaaaagacggaaaggatcgcttcacttcagccaagaaacgcagacgacaagccaatcaagttcggagccggcagcccttctgggctgctcttgccagtacaaaggttacggtgatgagggaatatgaacattcacgggctatttctaagacagcccgcaatctcacaatgacggaggaggatctgcagggtgtttctctcgacgacgggttaatatggattacggatgtggatagctcttcgatcaaatttgccgcgggtgattttaccgatgaccccgctgtgtcgggttcctttgaagctggccgtttgggaggagatatggagccgttttacgtctgcgtcaacggtgccctctgggctaccgcttcgatatgcagggtttcggatgccaaggggccgagcgttgtccaatggcggggcgagattgctggacttgctcccaactgcgcctacacatgtgcatttgtacggagcgataccgacgaggaaatctgtgtcatgagtgtcaagacgcctacaacggctgacacagagcaaggtaagttctctctgaataacaacgtctcgatttcaacaagctcattgttcgaacagtcatttccgcggtatcgacacccccacaacccacctaccgaccatcatcccccacaactacgctcaagaactccatcggcaatgcggaatccaagttgaatgaaaagcgcaaccgcctcaaaaagacgaagaacgaccacaaagcggttatctcgaaaatccggaaagaacttgagaacttcaatactcgcctccacagtggaaatgacgagaatcgccaaaagcagcgttcgcttcaactagaacgaaacatccggcaaaccgaagaggctactgcagttttggagatacaactcgacaccatggaaaatgtccctgaggaggagatggaagaatggtcggcgcacaaagcggatttcgaacgtgaggtggaacttttcaattcgactaaggaagaggttgctgctgctcggacagccgcagctcagcaggtggcggcgctggagttggaattgtctcaggccatccagaagcgcgagcgtctccagggtcgccgcacccgggtgaacgagcagtatgagcgcatcatctcggcgaatgcacaagggttgaatgagagagaacgtcgggctgctgaacaatttgccagagagcaggaccagtcaaagatggagagcaatttccatgagcaatttgggagcatcagccaatctgtgcaggacttccagctgcgcacgagtcaactctggcagcaggcatctgcaatcgagcagtccattcagcaacaacagcagcagatgctcctcgagtctggtcctctcacccccgaaggcaacttgccaggcaccaatcctctgcccgagaccagtggtccgtcgttcaacgcatccacgacctctgcacctagcgctcgatctctgctggggggcctcagctttcctgcgaggtctagtccactacaaatttcgtcttctccggttcacgaaatgccgtcaaatccaactagcccatcgcaggaccttcccttcctcccacagtttccaacctctcccatcggcaacgcgagctcatacttcgcgtcagacatcaacaaccgagaccgttcgttctccaaccgctccactcgcagcagccaatacggctctgacttcttggacacgaaccgcttgccacctctccagcttgacctgtcggaattgcttggtgagaccaagcctcggcctgggtctgacggaaacggtttcctgcatcatggtggtcgccgggttttgagtcctttccaacgagcagtaagtcgaggtagtggcaccggtagtggcagtggtggcagtggcagtgggacgggcagtccgcactcgtctcgagactagttctcggtacatgcttccgtggtcctatgcctagcggcgctctcaaagcggtgctcaagctcaattccatgcttgtctttcgagaagtggcctcatgttttgtgcgtccgtgcttttggttccgtccggttggattaccgcctcgtgctagtcaatctctttctcgtcggcctgcattgtgatgacacctagtttcttgggtcattgtggtagtgtggcacgcatctcgcgatgagataacaactgtatggattcgatcgaagtgagatacatggcagctctgttcctaaaaccgaaaaacaaaagtgttctatactcggttcttgtatatctctctcacaaaaagcgtagacgcatcaatatcatgaaagcatttctcatcttcatctcttcatgtctcctgtaggatcatatagcagataggccgttgaaattggctgtgataccgtatgtctaactgaaagtctatatacaaccaaacgccgtattcccaagtatatatacagtgctttgtcggaaggcataagcgacgaagcattcttcatccatcgctcagatgaaaccagacatgccagacaactacatgtatccaagctcaaagctcaccccccatcttccagaacttggtatttgcatacgtcaaacaaagccgctcaggcgaatgctcatccaagaccttgtcatcctgcccctgtgccgaaacagactcagagccctcgatcgcccgaacaacagtacccagcacaattgagtgatcctgcacatcaatcttctgcggatgtagtgtacattcaaaaacaaaaggaaagtcgacaccatcatttgcagctactgcttccggcctccgcttaagaataggaagcggtctttgaggctgtccctcctcgttcttagtaggcaaagccgcgaactcaaattccccatgtcctctcaacatagcagcgagggtgacgttcccctttgagaaatccctggccagagtagcagttgccggacccggtgcaagcaaatgcaccagaaaccggcgcgaagcaagtaacgcattcaatgtctctgatgggcgacgcacattgaaagagatcacagggtccggagtgagggtgacggtgctgaaggaagagacggtcataccgcggaaggaggttgtgttttctggaccggagggatcagttgccgttatgattgcgacggggtaggggactcgacgcatgaggaggcggacttggtcggatatagatgtcgagggtgttgatggttgtggtacgttgcctgcacgggatgaggcattggccttccctgcgcaatcattttcttttaaagaggctgtggcattgctggtatatcgtcgttgatcgtatcgtgatcggtgttgggtatatggtacatgcggagaggttcggagggagagagatgttcccaggaacgggagtgaatagttcttaatgcatggtagttctaatggctcacattagtaccacggaaatacttcgaaatacatcatgacaacctacctccgagtcctgtccgagcagtcccatgcgcgactggaaaggcgagcttcatcccgccaggaattgacggagctttgaaaggcgctcagggaatcacgcaggacacaatatcacagatatccagacactgccaattcatgtctaaatccccgaaaataagagagactcacagagatatggagcaatatgaagtcatgcgaaacatgcaagttaagaaaatcccgaaaggaacagacccgcttacataacccgcgataatttctctgctatagcatcaacttcgcaacctccgcaacatccccgatagcattgcggccgcgtcttcctcccacctcgacaatcccttcattatttacattggcattgccggaataacccaattcaacatgtcaatgcacacttccctccgccgcaccgcggccacaatcaccaactcaacaaccaccatcctccctacaagactacccacgcaatcgagcagcacaaccttcatctgctcgcaatgccgacacgccactctcctccgccggcccaagcgcccctacaccttcacacaactcatcaccctctctgacggcagcaccttcacacaccgcacgacctcgccagccccgatctaccgctccacccgcgacacgcgcaactccctcctctggaacccgtccagcagcaagctgatgaacgtcgaggaagacgaggccggtcgtctcgcggctttccgtgccagattcggtcgcagctatgatgccagcgcgcctgttgctgacgaggagacggctaaggaccctgctgcggctaagaaggccgaggcggatgcgaaggcccaggctaaggaggatcaggaagaggaggataacttgcttgatttgattagtgctttcgggcagaatgaggcgccgcctccgcctgagaagaagcctttcaagccctctggcaagaaatagtgggctttttggattttcccggattgaatcaggttgtctggtttgggccgcttggatgggagttgggatcttcttttgctttttctttgtttattttgctttgtgtttttgatcttgtacaatatacatgtctggtatgagcctgctgtattataccaagaattcatcttttctctcatccatgctaaatatttgtcaagtctatgcggatctatggtactttaaagtatttagttctcaaatctccggatattgggcagaggaagtatgcattcaagacagaataactgactagggtacataggtaatggatttatttgctacagtacacgaacagtggtattcggagtgaagcgggaatagaagagaaaaacacaaagcttatcggcttgctgaggatcgtgatcaattgcagcatggcataaacaaacatcgcgaaagggatgtcccataatgaatacaaaagacgaggtaaaacggtgcgagtagtggggttgtgaaaaagcacttttttcacccaggacaggagaaatatcaagcatcatcttcagcagccagtggccccgattccgaggccgacgctgtgggctctgccggagcagctgcatcgctcgcctcaggaggtacataatacgggagcccctcctcgccagcatctagacgcaggaggaatgtctcccagagttcgattaactgtagctagggttagctggatggaataaacacgcaagagttggcaagaaattacctctttctgagcctcgactgcactttcaaggaaggtttccacgccagacttgaagtcctccaccttctccttctcaaaccgttgtagctcgtttcgcataagccgtcccatatcctcgaagagcagccgcgtctggtgcactttgcgctctgcatctgcgacgtcggcgctgatttggttcaagcggtcttgctgagtctttccttggcggagtagcttgtcttggttattcttgcgtttctgtagatcggactctgctgcatgccaggtgtggaaagccttttgccgctgcgtgaaagccatcttgacacttccaattaaacggatatattcgtcgatcgtgattccaagcgtcagaacatcctgctgcgcctgccggtcataaagttcgcgaatgcgcaattgaagttctgacaggccttccagtggattggagagagcgggagacagctcgacggcagataaggcatgcaatgagctcgaaaagtcgcctgcggcctcagctagtccctttcgttgtagaaccacagtgtccattgatttcaatagagccttcagctggttctccaacgcatccaagtagatctttcggtcgtggaaccactatctacatgtgagcaggcgaggccgatgtattaaaaacgattcacttacatcgtcatgttccacaaatttggttcctccaccaaccgagataccgaaggagctcagcattcccttgcttgggccaatatcgggctctcggttttccttattcttaacatcgacgttgaaagcttcactttccaggaaaattttcagatcgccatcatgttgaagaataggatggctggcaatcttgttaagcattcgttccaaagcagctctcctcgactctacgaagttggtatcgaaccggccaaccgcttgcttctctggcggaggcgcaacaaccactcccgggttgctgccgtgcagggagttgtagagccagaggaaatcacggtatcgacggctgacggtgaactcgggttggcgataggctttagatgttgtctagcaataccaattactgtcagcttcttcttttccagtctgtaggtttcatgtgcgtggaggcccattattaccttggtcgaaacttgataaacaatgtgactacttgtcagatcccccactttgtgcggatccccgacgtagatctggaaagtcggcttcgcagcctgttccacgctcatgctaggctgcgtttgtcttttcgggccatccggttgcgccggcggctgcacgggagggggtcctcggaagatcgcgctctcctcttccacattggccgagtccgctgccccgaccccgctggatgcttgggaggcagaggagaatggtcgcgcgccacgtccggcgaaaggctccttctggggcggtgctggtgcctcatctgtgggtgttggggtggcctcggcgggcgcttctcccaatggaccgagagggtcgacggaatcatcgacggattcgagtttagtggcttgtgcgctgatcttgcgtgtgcctcgggggcctcttcttcctggtacgcggacggcgggcgagctgtctgacgcgggggtttgtgcagctgctgtatggtagtgtgcttagtgggaggtcgtggaaagagcggataagccaaaggatacataccacctccctgagtgctgggtttggacgagtcatcgctgggcttgaactgtgaaggctcatctgcatcataaatcagaccgcgattcaaagagctgtggtatcatgactgcctaccgccccacggggaatctccagagtcgagatccattgttaccggtatgagatcgaagcgaagagaaggggataacggtgagaagatgaatgaacgaattaatactgattttggttcaatcggagcttaaagggtgcggtatggagttggagagggagctggttggagtggaggctgatccgcatccttagtcactcacgggatccagccctggagcctttggagtccacctcttttgacttgtccaactactttgcaattggcactgcttttgctatttatttatgctcatgatgaatccagtcgcctcttcccaaccactacccgataatctctgcccagccgttcgccagcatgttctaaatgtcccacgtcgcaatacgtcacatcatttcaattggagcttcataatgtcggggtaatctatctacggttttcccagctcaaatcaccatcgcgcataaaataggccgttagaaaccatgcagtatctatttgacccacgggaggcccagcttgtgcatttctacagccagctggaagatgtaatccagactctcacactgagtcttcgccttggcagtgttatcaccccaaacgtaactgcaggaggaaccaacattagtataggcatcaatatcacatggagtgaggttattatcacttacattccgtgtctccggacaagcaccgcgtatgcgtctgggtacttgttcatagctgcctccaaaccgctggtgaggtcctcttcgaaggcggtgttttcaataatggggattttcaaagtatcgaagaatccgagcatgccctttcctttaccgcggggaatgcccttgatctgctcgatgttgctgatctcgaagcaagcgtcagggcccttctcccgctccaccaacagggtgactagaaccgcccattgtgagtgggtgtggatgcagcagccagccccttgctcaaaggcagtcaggaatagcggggtacaagcggaggggttgagcttgaggggcttgcggatgtagttgcgttccgaggcagggtatttaggggtgggccattggagcacaaagatgttgtgaggctgcatcaattccttctgaactccagacggggcgataaagatgtggtcaccttggcggatcgaggtctactgttgtatcagcggggcaccgttgcaattttttctccttcgaagtataagcttacaccacctccagtgccggtaacccatccccagttgtagaatttgcgacagagctcggggataaggttggccgggtgctcagggtcctcagactggaccaagtggtcattgttattcgttgcgacggtttggtctgcggggcacatgatgggctacgacagattagcgtagggtcaaggcagataattccagagttggggagaggacctaagattgcaattcaactttcttattgtccagattagtccagctgagatatgaggttttgcgccgaaagtgccgagtaaccaatggacgtttgaggggagggaagagtaattggggagatctgcgcgggaccgcacattcgtccatccatacttgacaattgctatataactacaagataatacatattaataactcctaatctggaattggaatagctcttatatttacagctcgaataataacaaaaagaaagagatattcgaaaatgtagcagtgccccggtagtgacacattatataagcaatttgcaagaatgggattccgcccaacctgggtcaccagctacatacaacatacattcttccagggatttgaatatttctctatgccaaagaccaaaccatttcaattcctccagggctgcccaggtggcatggtaaactgactcacccggtatcttagtcttgtaggaaatacaggataaggatttgacatcttgaatggtgtattgatgaagtgggagcagaggacagtgcccatagacatttcagaaatgcccgtctaggcatcgaaatgatctaatgcaggtatattagatatgacgtagctgtatagctattgctacacctattctgtagagaagtgggcttgttggacacctctcgatgttactacgagtacggtatcttagaatgctagtgacggaagataatcactaagctctaagccagtaccagtccgaacatttcctagaccgcgttggtgataatgcatattgtaaactatccggagtctcattcattttctactgagaaggaagcacaagcaaggatcaatagataggattgacgtcgaaaagagggacggaggggaagaagaaggaccaagagagtgaagctttctccgtacgtaacatcctagcttggtcaattgggcatctactacaccacgtgttcatgcgtgcaagcatctatatatcgcgtctctttactatagactattccgtagacgtatattactagtgcgactggcgtttatcgagagtgaaggtgcatgaggcctctacgttattggcatggatgcttcccggagaattctgcttatgtagaggtatatagtagagagaagtctagctgggtacaagctcaaatactaacttatgtcgattagaaataaatactgggacagaccccgagacgtagcctgtgttaaagcacataggaaagaaacacttagcgtgatatcgcgtgcatcaggcttcactgtgactagcttgttacatcgcgcgtatcgaatgttgattgcagcccgaagatgcatccttgtgtcagcgttaagctacctaggtaacccacacctagtccgctaacaactagcccgctaaagcgggccaggatccacggacccactattggaatccatgcgtcagatgctctaaactaaaccccagacgcatatccatcgtcattcacaaagggtgctgcacagggcaccgagcctatatcttgcgcaagtgtatatccacaatcacgcctagcgtagtttctatggatccgtgtggtttttgtccgctaggtcgaaggcttcgtgtatgggcttctcatttctggtcattatcctttggccacccctaatgcactccaggcggacagttccaggacagtttctcgaaccagcgatacgcgacgggagccctttcctgtttaattggtccgactgcgggcttgggctactgatgggagcttgccacggggcattttgagtctgcataagtagctagatgctacgagaaaaaacaccagttcgggggcggaccggggactttatcagttctttctgggaacttggcccattctcgttgcaaacgcggctgttctggttggggcatttgagctgggggctggtttcaggtctcagttgataaaggcacacaacccccgggccacgtctgactgaatattagcgacatcttccaaccttcatgattccagtacgaatgcgttattttcgtatttatccatgaacccccgccctcttgtcgcctcggcccagtgtttccggaagatgtatgatatgatcgacgagagcactatcgctttagaatggttagacaccactctcgcagagttgaaatactgtcctgatatgcgtatcggctcccttatccgatctttttttgagagcagcgctcacaagttgtgtcgttctcgagaactacgaatatatgaatacaggtagagtacctggtcttaaaaagagctgaaatttgctaattacatactctagactataaacccgttaatatcctactttccggtatccagaccaacgccaaagtagcggacttaggactcggtgagcaagtattaatataggtacgagaaatgtctttactgaaacgcttatagttgtcccggtcggcgaagttactccaaccatatgctatgcgtgcccctgaagtcttcctaggcaaagcgtgcactgagctatcgcaggtctgggctgttgccgcgatgctactttgctggatcaaacccggtgtgttgggggcatgggacagcccccttcttttgcttaacaacgcttggtctatggcaaagatacagcggctctttgcctactgggagatttcgacatctgaaacggacgtccttaaagctacagtggaatctgcccgatgtttaagtgaagtgctagaactacaatcgatcctacatctggatgaagagacaaaaaaggtggagatgccgcagcagttaagagatcttcttcgtttcattctggtgcctgatccgaaattaaggccctccggtttcatctgtgcttgcatcgagtgaatttcgaaagttcgaaaattatgcgagcgagtaaactactcgtgcacctggctaatcaagttggagttctgtgtcatgatgtcttgtctataggggtggatagtgaataaactaaatctcctacctctggatttgtggtgtctcagtagttacagcgacaagcgaattcttgattcaactaggtgctaattcatggatacagctatcacgatcctagtctgtgttttgttgcaggtacctaggtatgtacctaggtacctaggtagggatttctgctgtgcttatataatatatatgtattctagtgagcagatcagctcacctagacacatgctcaatttcacttagcaaaaagcgacaagaagtactaaaatggaaagggaaagggaaagccaagaagtgacagatgtacggagtagtacggagtaactagtacggtgtaggtactcgcgctagctagcgctaccgcgttaatccacgggtctcgcgttaggaccgctgccgcgcggagcgctgcttaacatgcttatattggaatatccgactcgttaatataatattttattctagctctttttatcccatccacttagagtgttgccggcgttcgcgtagcgttaaggcgattagtagttgtgcatatgtatgtagaacagaatcgaagcccgtgtgtacacgccctagtcccgattggggagcttactgaagaggccacctggaccttccccccagtgttgccctttctataaaaccacctcctcttttcttcattttggtgctgtgcgctccactttcattccttcgatttgttgtttacaatatgcgctttaacactgcgttgacatcggctctggtttcctccgccagcctcatgggctacgcccatgcggaggaggaaactgccgataccaccgtcattgacaggcctacctttactgtatgcatccaaaaccacaccttctccattgcctcctgctaactcctggaagcctaccagcctcaaagctccattcctggagcaattcacagacgattgggagtctcgttggaagccttcccacgcgaagaaggatgacaagtccgacgatgagtgggcttacgtcggtgaatgggcagtcgaggagccctctgtcttcaagggtattgatggcgacaagggtctggtcgtgaagaacgctgctgcccaccacgccatctccgccaagttccccaagaagattgacaacaagggcaagacattggtggttcagtacgaggtcaagccgcagagtgagtcgtgactttctacaattgctcgcgttttatttactgactgaaattgcgttgtgttagactccctggtttgcggcggtgcctaccttaagcttctccaggagaacaagaagctccaccaggacgagttctccaacggcactccctatgtcgtcatgttcggccctgacaagtgcggtgccactaacaaggttcacttcatcttccgccacaagaaccccaagaccggcgagtacgaagagaagcaccttaagactcctcctgtggcccgcaccaacaaggtcacctccctctacaccctgatcgtcaaccccgatcagacctttgagatcctgatcaatggtgactctgccaagaagggcagcctcctcgaggacttcaatcctcccgtgaaccctgagaaggagattgatgatcccaaggactctaagcctgccgattgggtcgatgaggttaagatccctgaccccgaagccactaagcccgccgactgggatgaagaagctcccttcgagatcctcgatgaggaggccactcagcccgctgactggctggaggatgagcccgagagcattcccgaccccgaggccgagaagcccgaggattgggatgacgaggaggatggagactggctcgctcccactatccccaaccctaagtgtgccgatgtctctggctgtggtacctggacccgccctatgatcaagaaccccgagtacaagggcaagtgggaggcccctctcatcgataaccctgcctacaagggtgtctgggccccccgtaagatcaagaaccccgcctacttcgaggacaagaccccatccaaccttgagcccatgggcgctattggcttcgagatctggaccatgcagaatgacattctgtttgacaacgtctacgttggtcactccgttgaggatgctgagaagctccgcaaggagaccttcgatgtcaagttccccatcgaggaggctgaagaggaggctagcaagcccaagcccgaggtcaacgaagagggtaccactgtcaccttccaggaggacccagtgaccttcgtccgccagaaggtcaaccacttcgttgagctggccaaggaggaccccgtcaacgctgccaagaccctccctgaggtggccggtggcctgggtgccctcctcttgaccatgatcctcgtcgttgtgggtgccattggcgccagcagccctgcggccccggccgagaagaagggcaagcagcccgccggtgctcccaaggagaagaaggaacaggctgttagctcctccgctgagaccagcaagggcggtgccaccaagcgcaccacccgttcctcggccgagtaaatgcgataactggcaaaccaattatacgcagaaaagaattttacccataaacccagccagcgaagagatttgcatttagttaccgcagtgatcccctttttgttatgttttggccgatgtagtagtttaaaaggtgaagaacattgaatggaggcccgatttgtatactcctgtttatcgctattattatctctactcggtattcactttctttttcggagacaattccctttatgcgttttagtagtgccgcaactatggctttttagcccaatatggagaaagcaaaaattatggcttgaaagggaaatgccttcctaattgacttcgttccttgccttacaacatctaatacgcgatcccccgattaagcgccagttagtgtcggcgattcgagaatcactttccagcttgtcattggctgaaaatgccgagaagttaccttatctgggggttcatttgtacaatgtggggaaccttggaaccgtggcaggccggtgactaaggcggttgacctcgggcctggggtaaccattagtatatgattccccgaggtcctttcaccctcaaaccatctttgcatttctcttcctacttaatctgtgatttgtcctgtctccgcatctcatttcttttttctctcttcaattcatcatggctgcttgtcggtcagttgcccgttccatcccctctctccgcgcagttccccgcacggtgtcggtaactgccagagctgcctcttcaacccgatctctcgccacaacttcccttagtagcttggcctctcgcagagcaattctgccctcttcatcactgtctgccactcgccgcttgcacgcaacagctcagcggctcgtccacgcaacaacctcagccgtctctaccgccactgaatacccaacaagccatcagaagattgccaacccaattgacaccgctaacttcattgacaatgagtttgtggcatccaaggcatccacctggattgacctccatgatcctgccaccaacaacctggtcacccgtgtgccccagagcacagatgcggagctaaaggccgctgtggagtcggccgagaaggctttccccgcttggagagctactagcatcatggccagacagcagattatcttcaagttcactaacctcattcgtacccactgggaccgattggccgcctccattactcttgagcagggtaagactttcgccgatgccaaaggtgatgttctccgtggccttcaggttgccgagactgcctgtggtatcaccacccagatgaccggcgaggtcttggaggtggcaaaggatatggagacaagaagctaccgtgagccgctcggtgtcgtggccgctatctgccccttcagtgagttgcctatgtcaacactttcaatccctcagatgctaattgtcaccaagacttccccgccatgattcccctttggtgtattcctgtcgctaccgtgactggtaactgcctggtcatgaagccatccgaacgtgaccctggtgctgcgatgatcctggcagagcttgccaaggaggctggtttcccaccgggtgtgattaacatcatccacggtaccgctcctactgtggacttcattcttgatgagcctgccatcaaggctatcagctttgttggcagcaaccgtgctggcgaatacatctactcccgtggctctgctaatggcaagcgcgtgcaagccaacctgggtgctaagaaccacgccgccgtcctgcctgacgccaataagaaccagtgtcttaacgctattgtcggtgctgcattcggtgctgctggtcagcgctgtatggcattgagcaccactgttatggttggcgagactaaggagtggctgcccgagatcgccgagcgggctaaggccctgaacgtgaacggtggctttgaggagggtgccgacctcggccctgtgatcagccctgagagcaagaagcgtattgaggacttgattactagcgctgaggaagagggtgcgaccattcttctggatggccgtgggttcaagcccgagggctaccccaacggtaactttgtaagtctaactataggaaaccctctacatctgtgtaactcaaactaattatgtctgcataggttggccctactattatcaccaatgtcacccccgatatgaagtgctacaaggaggagatcttcggtcccgttcttgtctgcctcaatgtcgagacccttgacgacgccattgacgtgattaacgccaacgaatacggcaacggtgctgccatcttcacccgctccgggtcgaccgcctccaagttccagaaggaatgcgaggctggccagctcggtatcaacgtgccaattcctgtccctctccccatgttctctttcaccggtaacaagaagagtattgctggtggcggtgccaacactttctacggcaagcctggcttgcagttctatacccagcagaagactgtcaccagtctttggaagagcgaggatgcagtcagcaccaaggcccacgtggtgatgcccactcactcgtaaatatcttggtgtctgcctcccttgctttttttatatttcttttagccgattattcgaatgacgaaatttgtctttcctagtcaaacaaaacacatgcctcatggatgtcaatgaatgaatgtatatgagccatatgcttgtttttatatcccagcattcatgaatttggacacggattaccaaattgaaaagtgcatgcagcgttataatgatattgattctcggaaaaggaaacaatttcaaaatattcatacttcatctttgttatagcatgtctatgaccagcttcaataatacctccccaatgcatactaccattaatcaaagacaattgctcaggtagaatgctaaattgacctaaggcaaacctgaaaacccaagaaagaaagtacaaagcccatactcaacaacgggcaataacatcttactcgtcagtcttgcgatccttaaaagcgtaaacaagtctagcagacgcaaccttcccatccttagtaacaacaacacgacgagtatgacgtctctcgccctcaacagtctcaaatccccaaacctgctcagcagtccacccagactcggtattcttcacaaagctctgcaagaacacggcctcgccctcctcagccaggaatccctcactcttcgacccatcaatgagagtctcgccagtcaggaacttctgcaccttagcatcttcctcaggcgagccgaccttagtctggatctcgatgacagggcgcacagcgccgtcctcgctcttcgcgccggcgatgtggcgcgagcggccctgcagcttgccgaagatgtggtcgacgtgctcgcgcacttcccagtctagcttgcgctcttccttggtgccttggatgccgcccgtgattacttgctgcgcatcgatgtggatgagcgctgggttctcgctgtctgcgtactgcttgacgtagattgtgactgtcgcgtaggagagagccttgcgcatgacccagcccattccttgctgtttgggtttgttagttgggtttgtaggtagggtttatatatggtgtagtgcatggtggggataatataatgattgttatgacagggatcgtgagttatgaatttgtatgattggagggtgaattatgacaggggtaatgacaggcctggctgttttatattggggtaacttggcgggacgggaggttagggcttatgcataccagagttagaatggggtcggttgggttagagtgggttgagtcctgttatacatgagtattcaatttgatttgctttttctagagcttgagttcttgttgggacataccatctcccattttccactcaagtcctgaatagtaacatcagcaggggcggccatcttgaaggttgatgtatatagtagctggtttgaagatggaatgcggggatggtggggggaagttgatgagccacgaaagggtgatttggtcagttgaagagaaacttggaacttcaggggtaaaaaagaagaaaaggaaacggtttccaagcgatgccacttaatatatagttgtcttggaatgggcttcaagggcccattatgtcaattgcatgtggttgttcctcaatccgaggcaagaggtcacatgatctgctgactgtacatgtgattaaggagagttcggtgtttactatacgtacttaggagctacaatccaatcatgtctttcaataagaaatatgccgggcttcctgatctggtgagaattaccggaataccggatgttgatatccactggcctttccactaactgtgacccaggacccatccccagatatctatgagacccccgacttgaccgacgaagcatccaccttgcccgtgagttcgccaattccacaccaaggacatgtcagtgggtctagttactgatcttctctagactgccactatccgcacagactccgaccatgatgatgcaggctcaaactccgacatcgaccgcgagggtgtcaacccggaccaggcgcgtatgcacttcatgggcgcggccgtggacgcccgcgacgtcaatttctcagatagcatttccatgaagcggcaggcttaccggagcaagagtatgagccgccgccgtcgccggagacgcgaggatggggtagaggaggttggtgacttgagtgacagtgaggacgagtcgcttgagcggaggcttgcgcgactgcggagagaggtcgaagatctcaaggtggaaatggcgaacaaaaccgacgctgaggctggaggtgcggcagcacctgaaaagccaggagagaacctaggtgatggcgttgcggagctgagccgcgctctggacaacctgcacgcctcgcgaggtgcggcgaactcaccacactcggctgctgctttattgtcccagaagcttggacccgagactcgctctactacagacgcaaagacacaatcctcggccgatgcatcgaaggcagtctccacagtgccggccccaaatacctcttcggcaggggttctctctcacgcggcagcatttgacagccgcctagcgcttcttgaaagctccatcggtatctcaagttcatccaacccattcatagccgacggcatcaacgagtcaacgtcgcacccagtcctcccagctctggaccagctcgcctcccgcctctcagcactaaccggacttctggtcggcacgagcccagcaagcacagcgccaggagtatccaatgccgcgccaggcatgacaaccccacacatggaagctctctccacgcgagtgcgaaagttgaccaccgacgccgaggcgctcaccgcagcgcgcagaaaagccttcgaggccgcaaaggccgttcacaacgcccgactagcaagttccgacaccgacgtcgtccctgcactagaagcatcgactgacgacgaccatgccgccaagatccaagccctctactccaccctcccaaccatccaatccctgcacccgctgcttccaagtgttctcgagcgtctgcgctctctgcgcgcctgtcatgccggcgcggcacacgccgcggactcactcaatgagctcgaaaagcgccatgccgagatggcgtcggagatcgagcagtggcgcgaaggtctcacgaccgtcgaagaaaagatgcaacagggcgaagctgctctccgctctaacgtggagactgtcgagccctgggtgcgtgatttggagtctcgtctggcgcgtctggaaggtcccgcggcactgtgatctatttcttgtatctacttttttgatctgttccggggcagaggtttgatgaataatacccagtttgcatgtgtcgagtgctgagggcatattgtagttatcttcaattgttaatatcagttccataccagatggccctgttggcttttatagaaacatagaaacatcattataatataagcgtagccagactaccagaccagactctacccctttctattcacccgcctcaacacttgaaccctcggtctcatcttaacctcaacccaccacccacgcgccaaactattcctcacatactcgcgcagaccgtcaaacaactccacagcacgcgcacccgcaatagtacggataacacggcgctcagcagttcccgtagcaggagtcccaggcttcaaaaccgaaatccccgcaaaagaatctactacaagcaccctctcccattcggaggcagggagtgcacgccgaagacttgtctcatcagcatccatgaagccagcctcgtcatccgcctcgacaacaacataatcaaaccggtcccagaacccactagtggatttaacggtcttgtcttcggtcttgtcgtatacccatcccgacgaagcgggttgttgcaagaagcgtgttacacccgtttggcaggcaaggttacctaggtaaacattgacaggagcattggtcttatcgtgcaagttgaggatagagtgttgataatgcatagcgtcgagagcctgaccaccagggtaatttgccgcggacgcaggaagaagaacaaaattcgacagacagaatgcggcgagtgtggaggtggccaaggcgtgtgtcgccagacgggcaaaaacagagcgcgagcgatgcgtccagagatatgcggcgccgagggctgctactgccgtgagggaggggatgatgtagacgatgaagcgccattccttgtgtggctggaagctgtagatggcgacgaaggacagggacgggattagaagtgccagtgcgggggatcgcgtggcgggatgtcggagggcgatggggatggcgaggaggtaggagaggggattgaagaggagacgggggaaggcgtttaggaaatagaatgtccatggctctgtgccccattctgaggattggcctgccaggacgttgaagcggaaggcttcgaattccggccagagtgggaagcgttgccagaatgtgctgtcgaggtagattgtgagggcgaggccggttgtgaggcctattaggcctgcgatgacggtgtgttggaggttgattcgtctggttgctagtaggaagagagtctgtgttccgactaggatggctagctcggagcggaagattacgcctgcggtggtgaggagggcgagtgctaggctgtattgcttttggtcttgggatgttgggatacggcttgggaggagcagacacattgctagcgttgtcatgctgaaggcgaacatgtttgatagtggccttgaggcatagaatatcaagtggaactggcttgcttggagtaggatataccagatagctgctggctggccgaagctacggcgcaggcctcttgcatagattgctagagaggaggcattgagcaggcccagaatagctcgagctagatgccagggttagcttggtaggatgtatagcagtatgaatccatgccgtacctaaaagctgtcggttgatctcctcattcaaccagatcacaggcttcgagagcatagcaagggccacagcgccaatggcgctccggggaacagcccccgggaaagagaaatggtcatagttggcgcggttgagattcaggtcattaaagccattgggtagcccgttggctaagacatcatgtacggcctggacgtggaacgactcctcgactttggtgtatggagcgacgaggagatgaaggagaatcaaggctgggaagagaagagcgagaaacgcaaatgctatagtaaatcagttagtttattagtttatcaacttggtgttcttatatagagcaaacgaactatatcccatggtgactgcatccgagaagagtgttaatccggagatctggcgcctcccgcacttcaccttttaacatccccaacccgcaaagatgtttttcttcggtcttgggaagctgttttatggtatgtacttgtgttcctcattcttcagcttatactaatattctaacttccagtcatcatccttatcattaatgccatcgccgttctttccgaggaccgcttcctagctcgcggtatgtccctccccagctacaccccgaagatgagaacctaacgaatactggaatatacagtcggatggggtcgcacacaagccgagccgggcttcggcgcgacatacgatagcacaagcgtgaaagcgaagtccgtcaacctgatcgccagtgtgcggaccgtgatgcgaagtacgtttcccaacccccgcaacccaatataaaccagggcagtctggcatcttggatctgagtgatagttttcaagattgaagttgtcgcaaactgctctgcttttataaaatgcgacactccatggcctgacggaatggctaacacatccacaatccagtaccccttatcgtcatcaacacagtcatcgttgtctacgagctgattcttggttaaattcgccctttcgccgtttcctccacgctccgaattctctcacggattcgttgcgaaccagccgatagctaccctgctgtctggccaacctacatagctcttcactacgacttacgctgtgacctcccttccgacgagccattcataatccaatacctctatatcattaatgacgcctaagccagaaacgcggcacgattcacacgagcatggggcatactcggggacagagaggtggaactgggttatgtgtaataggaccggaacacccctaccaggcatacacttcatgttttcgctggtgaagtcgttgcttggggtgacaggaacagtggcgtgcagcgaatagcccatcttcctctcggcgtgtttgttttgattacttctggcctgtacctatatacccaccaaaatgccagaaccacaatggacacatgactgagacatggtttacgtgaagttcagaggactaggtatgctgtttgtaactgcatagtaaacctctattttctattcgttcttttaatcgagttggtgaccggcctttcctgtgtatagatgaccagatgacagtaacaaaccgacactgcacgtacgcaaaagttggagcaacggactgaacaaatgttgaaaaagaagattcgctcacgacttaaaatgagacatgtaagaagagttcaaaacgccgaatccgataaaagacccacgctcgccagcaagaaatagcaaacccaatacgcctcttttcgcaaaactgccaggattcggtcctgtataggtatcacgccgttgtacatgatacaaaaagcggcagtggtgaaaagcaatggcagcaagagagagaaaagaaaagaatacaaatcaatcagcaagatacaatagccctggaggggaagcaagtaaaacaggggatctgaaatccaacagagtctagaaagacatgactgtggaaataccccgggatcgaggacctccacaggagaatggaagacggggaagcgcagatcataagaacatgatagtacatccattagagggagctatgtgcagaagcaaaatttgcgctcatatgtgcaagatgatagggggtatctccgtgaaagccaggctgaagatatgaggtgaaaaaagcaaaagcaaaagtgctgtctgaacaagaaaaaaaacacggattctagttcatgccactttcttgaaactgaaagatctccaccgaggggtatggccgggcttcgtattgttggtgtgttggtctttggccaagggctcgggatttcggatgggttgcgtaggttgcttggggttggaaataggtgggaaatttctcggagaagaaaccggtgactgaactggctggaccgggctggttggcttgatcggctgaactggtttgttcactggctgggctggttctgcatccttgaggggtccttctggcacaacttccggaagaagcggtgagctcgacagatccgatgttgagactcggggctccttgtctttggtgagtcgatgactgagactgcggctgcctcgttttaagaagccgaaactgctcgacttccttggtgatccattctcagcggcgaaatcgaccgtgtcggccctactagcctcgatggctcttttcagctcatctgcctctcgtcgctgcatttctcggttatgcaggtcctgctctttcaggcggttcttttcattcttatccttctctttctccatggcccgacgttccttccgtagttggtgatcactcttctttgggctcaatgggggagctggttcgtcagggatcggagggagaggcggttgaacggtccgcggtgaagctggattgggctctaagggttcttctgggtaggtagacagttggggtgcagttgggattcggctgagagggatggaggaagttgtgttatcaggcggcgcctgtgatgcactttgggcatgagctagcggtggtgagaagggagatccattaggctttccggcatcgcctgtttcggctgctgcggtcgtgggagcctggttctcttgtgcctgctctcgcatgacagcctcaagagttgtctcttgatagaacagaacataggcacacgccaatccgggtcgatctccaaagaagttacgcacgtaacttttgtcaaccggttcgacgagctcatcgtcgaatagcagccaaccacggtcttcggtcttgataatggcaacgtagtggccgtgatacggtcctccgccaatatgaacaaccaccgcatacaattcataaagccggtcgggatcctcggcatcgtctgtggtgttaaacagacgaagatggtagggatagacgacgcgatggaacagcttctgtagtcgctgcaagtcttctgtgtatttgaagcgcttcaaatgcaaagccaacacacgaggcaaacgtttgattttcatccgcttctccgcttcttgcagtccaccgcagttgtcgcagtggaacttattgcgctcacaaagcatctcctcggccgaaaactttcgaagacaagaagtcacggatgaatgctgctcaagatccacggataaatctaagaacacctcatctcgctgcgagaccttttcacaggtgagacacttggtctcggacgtcagcgttccctcaaacagctcgtgaacccatctcgtagtatttggtgacttcgaacccgtgctaggtgtcaacgttcccaacgaatccgcactctctgttggtggcagagccttctctgtgaaggcttgcttcgtggcctccgtttcaacattggccaccacctcgttgaggagcaaattcaaaaactcatgcgcatcctggtgcatggcggtccgaaacatttcattctcacgtcgtagaacgtccagaaactgttgcgggcgaacaataccaatgcgcgcttggcttcctaccacggattcgaatatgtccttgagcgaagtgaaaagggattccgacatcccataactggaggcattgttcttggtttctagaatcggaagggtctgcagtgccaccttcttcttgtattcaggtgaatccttgtcctccggcttctgatttgggttcgggggcacaccggcctggcgcgcggatggtggtgaggaagccttttgtttggcagccagcgcctcagcttcaaggtgtgcattggggttctgataacgtaggttctttgcgagggcagcctcgaggctgtccatgggcgtgcgttgcggatagttgatgacggcttcacggaagggaacggaatagtagagacattgcaggatggagttgcagtaacaagtgtttccatactagacaagcgcgggggcggttgcggttagtgactttgcgatccaagacagactcccggggaaagaccgaaactcacattttccattccataaaacttgtcactcccatcggcacggatggatcccatgtcctgtaacctcttctctagcggtgaaatctgcggtacctggaggtcttttttcacgggtggcgccgtggccggggggttggaagcctgcgcgaagtggaaagtctcaagtcagcggtcccaatctgaatggtctcacgagaggttgcccgaagcatctgttgtgctaccaggtttgaaagagcatggctgtagggatgtatcactcaccccattcttcgagcccttggagaagagggccttcatgatagcttaatggtcggtcgcactctgcattgatgacagtgttcagagtgtttaaagaccggagtgatatatgtggagagattagaaggaaatgaagcgagtccggggaaataaagtgattgtcgtctgatcacataaggtttctggggttccggaaatgagagagggggggcgggagaatgaagagatccaagggttatgggggaatatgttttaagggagatttaagagaaataggttaaagagattaaagagattcgagagattaaagcgattaaagagagtacagagagtagagagattaaagagaatgtaattttacacagtaagagaggggagtttacattggaatggacccaatttattgtaatctcatacaaaatatcatacatgtagtaacaacagtaacaaaagtaaccacagtaaagtaacatctccaacttttgaaatgcaacagaatcatccagaaaaagaactaaacatacataaatatctcctctcgacctaccccattcatcttagcctctactccacgtggtgacctaaggcaggtacctggtccaatcgccgaatttctacaatttcactcttctctatctcaacaaaagtatctctttacagcaaaaagatacaccggctataccggagccccatcttatcttcattggccataacgccttttccccagcggaatagcctttctccccccacgtccatgggagaaggacttccctctcatcgctcaaccaaggattccaactgggtgattggctctaagccgccctcgctcacgggccatgtgtccgcccctcgcatggcgtagccacaacggccaatgatcatttccatcgtggggaaaaatggaaagtggcggtggagcccccccccccaaagttgaaatgtgactgttccttacatacttgaactctttttctaaaatgtgaccggaacacaaaggggatatatcacctggaacacctgggagattccacctgggcacctgggcagtgcttatggaatctgatggtggccaacgtcagcccagatcaggttcaaggtttcaaccccttgcggggtccaacaggcaccgcaataccaattcagccattccattcggtagtaccacttacgcacgttcccacccatgggggctaatctgggtaatctggcttcaacgtctgatcaaaactcacaggatctgaccacatcgccaatgagaaacagtaaattaaacgagtcatgtcccttaccaaatccgtatggacgacatggagggggtggcgagcttgacctcttttcaagggggctcggtaaaagacgcatggtggtgtgtatatgtagaagataggaaagcaaccgcgcccgtactgaatcagtctaatcagtctaatcagtttagtcgctccagtcatcactctagtcacttagtcctatcgcatgaaatgacgttactgtggagtagatcgagtcagttttccccgacttgagcgatttactgaacagatgtcatagccattctaaaatgtaatgtacaatatacagagtacaatatacaatgtacccgtggacctatacttgaaatagtcactgtacggatgacatcggaatgttacctccagggctgggccatagtcccaaggaggaaagagcatttccctttaaccttgggcctgtccatttcggcaagggcagatccggggaagtccagaatccagaacttggctatataacgccttgaggcttaatatatcttctgacaggtacacaacataccaatgcctacagagtttgacttgtcgggcttcttgtgcatacctacctagctacggagtacatatgtaggtaataggtataggtaattaggcatgcaatatgagatatcacacaaggggcaattatatccattccattgcatctgtacatatgcgcatacatgtatacagtaactctgttgttaagcaaagaaaaggacacctgaagggttgtccggataaactatatcggaaaaacatccccaaacagaaagaatccccgtaccagcagatgcctcaggaggccaggagatgcccattgaaccaaataattctgtttcgcagcgccgttctttttttatatgccgtccattcctgtccccttgcgctctgtacaacgagcaatcgccattccatttggtctgactccaatttctcgcctgactcattgctcttccctgcagaaccgtcgagtcatctcgaataaaaataatatccctgcccccaccatcccccaccaaacaaatcatccccgccgcactcgacacttttccacctcccatcgctccgctcaatcaatcacaatggggaaagacaagggacctacattcaacctcaagaccccgaagggaaccaaggattggtccgggtccgatgccctcctccgagaccgcatttttaccaccatcgcgaacgtcttcaagcgccacggcggtaccgcactggacaccccagtcttcgagctacgcgagatcctggctggcaaatatggcgaggactcaaagctcatctacgacctgaaggaccaaggtggcgagatctgctcgctgcgctacgacctgacggtgccgttcgcgcgctggctcgccatgaaccccgacgtccgcagcatcaagcgctaccacatcgccaaggtctaccgccgtgaccagcccgccatcaacaagggccgcatgcgcgagttctaccagtgtgacttcgatatcgccggtaccttcgatgctatggtgcccgatgccgagatcctgcgcattgtcagcgaggtcttcgaggagctgggctggaccggtcgctacaccatcaagctcaaccaccgcaagatccttgacggtgtctttgccgtctgtggtgtgccggacaagatgctccggcctatctccagtgccgtcgataagttggacaagatgccgtgggcggatgtgcgcaaggaaatggtcgacgacaagggccttgatcctgaggtggcagaccgtattgagcaatacgttatgaacaagggctcgcgggagctgctcgactctctcctgaaggatgagacgctcaacgccaatgcctttgccaaggccggtctcgaggaaatggctctgatgatggactacctagaggcattcggcgtgctggacaaggtctcattcgacatgtcccttgcccgtggtctggactactacaccggtgtcatctacgaggttgtcaccgagggttcggccggtgtgcaggccgactccccggaggcacagaaggccgagaagtccaataagggcaagtccaagcagcccctcgaggaagaggaccgatccaacgatcctactctcggcgtcggcagtgtcgctgccggtggtcgctacgataacctggtcggcatgttccagcccaaggcgcagatcccctgtgttggaatctcattcggtgtcgaccgtatcttctccatcaccaaggcacgtctcgagcgtgagcagaagtccgatgcccttcgcaacagcgaggtcgacgcctacgtcatggccttcggtggtaagggcttcaatggcatgttgaaggagcgtatggaaatttgccagaagttatggagtgctggtattaaggtaagcctcccacttcagtcacttcagtcaatcttggtctatttgaacaattactaacatccatgtctccaggctgagttctcctacaagctgaagcccaagctgccccagcaattcaaggccgccgaacaaggcgccattcccttcggcattattctcggcgaggaagaactcgccgctggcaagtgccgcatcaaggagatgggtctgcccgaaggacacccggagaaagagggtgtcgaggttgagattgcctccctggttcccgagctgcaaacccgccttgctaagaagcagcagggtgccatctcatctctggcgcagcagttgcagggcaccagtgtttaagcgttagacagttgtgggtttgcatttttcattttgttttatttagagcgtgttttcagagggtttctatgttaccctaaaattgtgtagatctcttgcattgtcgggcttgggagctcgatggcctatcaaaaggactgggaggttattgttaagagaaaagaactaggatatccatggatttctcatagaccgggttggtgtctttattggaattgccagaatacccaattcattgcatttcctgtgcttttgtttgatcgaggttttataatatggccacacggcttatatcacgaccttgtcactccaagattgagaagcaaagatattacttagtatagaagtatagaagtatagaaaaggcttgcataaaaaagactagaagtacaatacacagaaaaagccatacatatacacaccccaactaatacccctccgcattcttcatcaagaacgacttaacaaaaggcaaccgatcaacaacgcctagtccaagactgcgcgccaaagcaacaggcccttcaccaggaacattatacattttatgcaggagatcgcaggcgccgccgatcttcgcattgggcaagtaccgctcagacgagtatcgttcgagagtaagcaagtcaccgatatccataccatgcgagacagcgtactggatagtcttcgagagcgaagcaacatccgccaagccgagattaaggccttgtcccgcgagcgggtggatgacgtgcgcggcgtcgccgacgagcgcaatgcgcggcgagatgtactgcgccgcgtgtcggaaacgcagagggaaggaagcgactgttcctgcctgcacggctgttgccgcgggagggatttgggatgggaggggggtgtgctgggcgcgccaggtgagttcgtcttggtgggatgtggaatcggaagaggaggattgcatgcccatcatgtaggtgaggtctgtcatgtcgagacggaaggcggcattgaccatggcgaggaaggccggggttgggagggactttaggtacgcggcgttctcgggggttgttgaccagacgagggttgcgtggttgtctggtagggggaggagggcgatggggccgccgagagcggggaggaagcgctggtaggctgtgcgctttgaggcagggaagggtggggtggctggctcgtcgagagcgagggttgcaactacgccgtggcggccgtagtcccagccttgggtagggatgtctgcgaaggagcggactgggctgttaatgccgtctgcgccgacgaggaggcgggcggcgatgcgcttgggtgtctctgtttccgcggctgggcctgtgggcttgacggtgaggactggccaggctgagaggtcgggaccttcgggtttgaggtctgagccgttctcgatggaggcgactgtggcgtttgagaagagggagaggttctcgtcgcctaagtcggcaattcggcgcagcaaggcgcgcaccaggttcgcgttctcggtcattgttgctacagtgcgcatgtcttcaaatggggatgtctccattgaccaatcgaatgatattcgggacccggtttggccgtcccagacctgcatgtcctggtagtcttgcacgcgattgacatcgaggtgatcgtaggcgccaatgctacgcaggaaagacacggtcgacggagtcaagctgctgaccctgttggagaactggttgggttcgaggtcccaggctttggctttgcggagatcttggctctcgatgagggcaactttgagctttgaggtaatgggtgatgctcctgcagtaccatggtatcagcatatgccctgcttatctgcattatgctggttatacatacgaagtgcagccaataaccctaggcccgcggggccacctccaacacaaaccacatcgtagaggtccggggaatccgatttagacccaaaccgccgtcggccagcgctaatgccatgccggcaggttgggcaaacatacggccgaaggacggctctggagattggacgcattgtgtttggtgattcggaggttgaatcggatgatcgaagatagaagtgcagtgcaaacagtacaaacaacattaatgcatacagctccgggggtcatgactggtgataggactccctctcttctttttaatggctcttgacctttcaatacatgggaattaatttcatcgctatttgtactcatctgctattgaatctgacgcctgtgtggctgcatatctgaataaatgaagagtcatgatggtattgcgggtatgaaacactggataagctagcgaaagcgacagatatgaactgctatatcggactcggtccggataacgacccaagcatgcttacatcggaatagctaaattgctccgatagcagccgcatcagagtcatgtccaggctcggcttcgccctccatttcggctacaaaccgctcccatgtagaaaggacgccctgatagaactcgatgtgcgaatcggcaaaggagccgagtccatctcggaactcgaccgccttgatacgttcgaaatctgcgacttcgcggataacctcctcgtcgaacatctcggatgtagtcttggcggactcgacctcgcgggtcaattcgtcaatgcggagctcaagcttccgcacacgctcgcgacgggactgttcgtggtcgacgccgcgcatgtcctccattttggagcggatgaaagatgcgggggaagaggtgagcgggttggaggcatagtaagcagctgggttggcagccagagagtcacgctcggtcacggctttattgcggtaatcgactaaggcctcgaaatcgagctgtttctgctcgcgtgtcttcagcagggacttgagggacatgatgtacgactcggcatcgcgcagcgagcccaagtagttctggtcggtgtggtccttcagcccgcgcatcccgcgcgcggtttcttccactgaagctgcaaagacctgcagtggcatctcaatggcaggctctaacgggacgagtttgcggaactgcgtcgctagctcggcatagtccgtctccagatcagactcacgtcgtgcaacccgtgccacggtcttctccacatgtgataggtcttcgtccagcttatcggccttctctcgcacctcgataaagcgccggtccggcttgtgcactttagagaaggcgttgacaaaggaatcagtaaagttatcgaagataccagtagccgcactatccgacccggtatttgttgatacccgtgttgagtgcaggcgcatatgcgcattccagtccggcgattccaagaagatagtgaggagaggcgcccgccgaagcacagggtgaagcgtcaaacgcttcaaaaatcgatgcagagaccaagctcgtcgcgttgtaaactccggtccgaaccggtctccccgcacgtactccatcttgtgcttgtccgggagcggcggcaccgcgcatgccgggtattcacgatagagcgtcttgtataggaaatagaaatcggtgaagcgccgccgaacagtaaagtcgggcttctgaaatgatttgaagtcggtctaaatatgtcagttatggtccacttgaggagatatagaggtcgggaggtctaggcagcagttgcacctccactccccgacaatatatgcaaagaagaaagcatacatgtgtggtaaccaggtacgagatatatgcgtcttttgtcccgtcattttcttttagcggagagtctactcggcactcgagaacaccatcgccgatgcccgccaggtccacggcgtcggctagcgggccagcttggggctcttcttgggcggagctcattctccgcttgccattggagtcgcggcgagtttcactgggttctgctgcatctgtacttgcagttgttggtcgtgagacatcgctgtctgggtcatgcttccaagacacactatcaaagtcgtcatgttgatccatcgttgagggttgtcggtcggccgtagtcaaccggctggtagttgttggaaccccagtaatgccgagaaatcaatatttgcaggaaatgtttgatcaagaagtgatagggaccgaaaaggttaaagaggtggaatggaggggaaagtttggaggttggagctgagttcaatgatcgccgttccccaaggcggagttcccgaagcggaacgtcatcgcttatcgctttattattagaatcgacctaactccatacaagtagtccctggcaaagatctaattgtcttttattattctagtgattcctggagaattgcttcatatctgctagaattatctttttagtatgcacagcacacttttgaattcctgtcatatgggagatatgcagaagaccttagtattctccgtctattccctgtggacgatgctctccaattttcaccaaattcaataacagcatatcgcaacaccaaacaagatgcaaaatgactatccacattagattaaggtttttcatgatgggggccatcatgggatgttccatcttcaccgtctttttcctggatattggccaacccatcacgatacggctcatcattatcgctgaacatttcctcgtcactctctccggcgaatgcgttatacagttcgccaccacgacgttgtgttcgaccagatgctccagtcatcggttgcatctcgtcctcatcctcaatcatttcaaattcgtagtcatcgtgagcagtggtacgacgacgcttgattctctgtagctggaagtagacacccaagccaatgaagaaggtaatgatcatgaccagggatgcataaatccaaatctgtgtgcgtttcgaagcaccaaaagtgggaagccaagaggatatatagtctgatccggcagcggaaggggagggggtttcagtttcactagcggtagtgttggtgggtatcttcacatcttcaacaggtgtgggctttgcctctgttggttttggcttggcgttcacaggccggtcatgattttcacctgggttgggaggggcctcggtctttgttggagccgccgaaatgctagtcgtggcgacaggagcatcctcgtaaggatggtcatgatcatgctcatcgggtagggggtgaagcttttgtttagttccatcaacggcctcaccccacagattgagtcgccaatcaataaatgtgccggagtactcgttgacatcggcgtccttcacgatgatagaccagtcgccaacaggagattcacccctaagaataggttagcagaagcgcatatgatggggttggaagggaaacacataccaatgagcgacagacatgaaagtccaatcgtcatacccaactggcatgtcatccttcctgcgggcaacactcaggtagctgacgattccagcagggctgcgcagttcaacgctgagatcaccgcggcgggtgtggttgacattcatagtcacagtgacatgttccaatttagcgatgttggcttccttcaattgatcagcagtcaccgtatagcgactgagcagaccgcgatcaccctgagggatgtcttgatgtactcgcagccatggcgagtgaagccaggcttgtggcttcacgagttcccaagtcttagcaagctggaccatggtatatgtatcgacctttccgaagccccagtcatgactaaacttacgaccagagggcaggacctgccagctaccgtcgtcttcgctcaccggaaccgccgtctccaccatcaagtgttgtagatcacgccaggtcaggtccgggcgtgcgctgagtgcgagcgccgcgctgcctgcggccagcggaccagccgcagaagtgccaccatgtccagagaagcacttgttcgcacccacgtcggtagtgtgaatataatcaccagagccgctgctgtatgcgaccacaagttgggcagagcatgactcggagtaggacgggtgattcccttcccggtcaatggcaccaactgtaatactgtagatactgttggtatacccatcgaagttgcagttgtccccgtaggccgcaccgttgccggcggcaaagacaaagacagagcctttaccccctctgcccttttggacaccgttggccatggctcgtttgatcaagattccaggcgcatccatcgtggcaccatcatcgatggggccccatgaacatgaatatatatcattcgtttggtaggcgaagttgatagccgccgcttcatcgacatcatcaataggcttggacaagatccggatgccggctatcttgctatcgtacgcaacaccgactccgcaaacatcgttctttgctgctgcgatctcgccgcagcatcgagtaccatgcttatcgtcaagcagaagagggcggggttcagggacattctcgttgaaatcataggagccttctgggaggtagttgggtttgagatcgttgctatccatgtccagcccatcgtcaacaaccgcagtaacaacccctttgccggttattccctccaaccacaatcctgtcacattgagatcgtgtccgggctgcaacgtattgagaaggtgccattgttctctgaagatcgggtcagtgattcctagagttgacatggcattcgtttggaaagcaacggcctgccgattatccctcttgtccagcgatctatagggtacggagaccggcggaagtcgtttctgcaatcgttgtcttgctggagcaatcttatgcgaccacagtatcttgtctagggggtcatcacttgtcccgcgcgaatcgataccctcggagcgccgccggagctttcgcctggtccgtaaatcattcagcaaggtgtcaaactgtgccgtctgttcccgcggtaatgagaatgtgtggtggccatccagttggccaatttggccctcgtggcgtgcgcctaggacctgtgcgatgtgggaaggagagatggtatcgtcaaggtggagggcgaagaagtcgcgggtctcttgagagcgagggtgtaggcttgcggacaccgcaccagcaaggcctagggtggcgatgatgccactggcaatgcgcatgatgagggatcaattgatttcggtggaggaaaggaaccaagggagggttgtgaggttcgaggtatctagcaggcggttgccatcgacagttccggaccgttgaacagcaactcgataagcaatggttcagggtgtatgtgaataaaatggagattccaacaaaacggtatttccaaggttccaataatagttgctaagaggaggttggagcgatgcaagacaccacctggggcaggtcaaggtaaaataggaggatcgtcagaggccacccacacgggttcctattgagtctcctaagaggtctattgagctcaacttagcttattcaaacagaagctaattcctttggcaactataaaagaagatttggggcgttttaaggccacggtttctactccatagtccgtactatattacttgccttgaccagatgcccaggtggctcttatttagcttacgtaggtacggtcttggccccggaggcgaggcagacgtagatatgccaactgttcgcatagaagacactactgcgtacatagtattccgtaccgatattgtaattttcatctgtttatctgttagtccatccatattaactgtaatagttcaaagtccttgcatgaacaacgtacactattccgtaaacatcttttccattttcactttaacctcttgccgctttatgctgggtataattgagaacgccttgaggctacaaaataaggtgatccggtctgaaatttacccggtgagttgtatcgaacaatagaacatcaacatgagtacgtacctaggtagtagtatggagtgctttatatgttacttgtgtacaagatcatatatgctctagataaacagtgaaacatacatagtttcccagtatccaggtacatacgaaatactctttatgtatgctcgtactattagctgattcaaatgttctaacaatagcccattccactccccataccaaatttaagaattatgcttaattctatatattctttgtttctgtacttctatatttcactatctgatatttcatatttctcctaacgtcttatgatctatatatattgcctctccaaggatcacagcccttgataaaaccttcgtatgacaatggccccgcgcgaaggctggggataaccagccaccgggatatcggatgtatagaccttgccttccatttttttccttggacttgttggacttgattgaaatctttctcttcttttcatctcatcttctacccccttgacacccccatcctagtctttatcggttcgcctcttatacaggccaacttccctgtcaccgctgcgtggacctatacccccgcccaacttggcttgttgcctacgaatcagctcgggccatggtgtggtgaccctgcgttaggcatcagatcaagtcgcatcgaactcgtttcaactatttcgagaaatatcaagtgatcctccccctaaatttgctcaggttgcctttggaaccaacattaacgattattgttttagttgggttcgcaattgcgtatacttggcactctatctacgcatttctccgattattgccttgagtccgggcgcgagtacacataatggctgctatggcaatgcgtggatcgcccgatatggcaaatggcagctccaacccccacattgccaacggagcgcaaagagctccagggaggcgcaatcgcaaaaaggctccttccatggaaagtcatgaacacgaagcggaatatgatgagacgaagacagctcacacgaacgcaagagataccaattcatcagggcagattgacaggtctttctcggccagagcccgaaaccagccagaaggaaacctgaactatacaacccgcaagccgattcctccatccacttcagaattaccagaggaatctacaacaccacgggctcttcccacagagccccactcccaagaacccggtgcagctatgcctgagatccatgtccagtcaccaccgcctgtgtctcccccgactcggtccaataccacacgctccgtctccgccagtgactcgcggcgagattgggcatcagagcgatctcccctccaaaagttggaagtaactttgactggaatcagcaaggaagagaagcgggcacgagtacaacaggcggaaatcaaagcccgagagcggcttgcgcgcaagaaggctgaacaagagaaagccgaattggtggcagaggtagcacgtgaagcaccaacacaacgtgcgcagccagaaagccgaccagcccctggcacagccagaaggaacgaacggagagatattccaattggggatggcatgcgcaatggacatgcggctgcaccaccacaacagcgacaatcagaaggcacggctgtacgtcacaacaggacagtttcaacaaatcctcaatacccatctattcgccgacccgaggacccccaatatacacgtgcagaagccactatcccatcatcagctaagataggcaaggtgcctagacgatcagtcacagtgagcggacctgccgcgaaaccagcacctgccaacaatatcagccacagtcgctcgatgtctcaagcaggtcctcgacctatgcaggctcccgctggtctaagagcggagacaacagacgaacttttaacagcaccgcctcagggtagtgccgagtcacaggtcaagcccaagaaacagtctgtgtccttcaatgtcccaccacctacgcccccaccaatatttgagtggaggaatgcacagcctgctcggcttgcggcccctgattttgatttccagaatattgatatggaccgcagcaaggcgtggtgggaaggtggtggtagcaaagatcgcagaaagagcagggctcttcccaagaactacaagtccccagctcagaagttgacaggtaaggtcctccgccatcctggttccaagctactgtttgtcacaaaatcatcggaatgtatttactaacgctcactaggaatgactgagcacaagaacttccaacctcacctcttcttacgatgtggacctttgctacgatacacaggtatcaagcgagtaaaggtcgatggagccagcggtcccattgaaaaagacatatggcgaggatctatcatgatagtgactaaagattctcgctcctcctacgaaactccacccacactgagactattctctcagccgatggatcttcttcctcctccacccgtcgtgatcagccatgaagatggaatgcaactggctcccgaatatgttgacccaaccgccgggctcatgaaaattggccgtgatgggcgaccgctttacgtgaagccagttgaacatgtggaggagcaagtcgacctatcgttcgttgagaacgatgatggcatatacgagctctcacctagtatgatcgactataccagcgaaggcgccaaacagcccatgccttccaaccggatgcacgcctccgatggcgaaaccgcaagtctgcaccgagatatcccaggagctcgtctgtacgccgatgctgcaagagatgtaacattctggcggttcaacctagaagttgaactgagcacaacgcaacagcgaatcgcttaccggatcaaccagggacctgccttgggattctgggtgccaccggttggagaatccatgaacataatattccacagtggtaacgggttcagcccgtctgcagactctgatcgagtctgcggacctgatccgctttggcgagatatccttaatgagcatcaaactcgtcccttccatgtgatgatcggcggtggtgatcaaatcttcaacgactcggttatcacagagtccacattcttccaggaatggattaaaattaaaaatgttgccgagagatatggggcgtcattcacacccgagttccgggctgaattggagcagttctacctggagcgctacgctgcatggttctctcagggcctcttctcgttggcaaactcgcagattcccatggtcaacatgtggaacgatcatgaaatattcgaaggctttggttcttaccacgatgatttcatgcagacttctgttatctctggaattggaaagattgctttcaagtattacctgctgttccagcaccacagtgttcccgatgaaaccgagacagatgagcctagctggcttcttggtgctcatcctggtccatatattgaacagaagagccgaaacctgttcatgtctctgggccagggagtttcacttttggctcttgactgccgcactgagcgacgggtatggatactccatctttcggacttgtggactacactgacatgtttttgcagagcaatgaagttctcagcgaagagacttgtgatttattgtgggaccgctgccacagggagatcatgaaaggagagacaaagcatttggtcgttctcacaagtgtccctgttgcttacccccgagtggtatgtaatctggttgcttctgtctttgatcagacttagaactaacattgaccccaggcaatgctccgcaatttcatgaacagccgcaagtccctcggcaaggctggagtacttggtgggcttgtaaatcgatctggcgggaatgtggaggtctttgatgaccattgggctggcaagcatctcaagtccgagcgcacatggttggttgaggatcttcaggatctggccgcggagaagtcagtccggatcacaatactcaggtaagaccagacactgcactccagattccgaacgataaaaaactaacttgatccttcagtggtgatgtccacctggctgcaattgggcagttctattcgaatcccaaattgaatattgccaaagaccatgattatcgatacatgccgaatgttatctcgtctgctattgcagacattccggagaccgacctcattgcagatacgctcaataagcggaatacagtccaccacatggactcgaacacagacgaggatgtcgttcccatctttgtccaggatgtgaatggcaaagcccgcaacaacaagcgattactacctcggcgaaactggtgttcgatccgtgagtataagcccggatctaccccacctgacacacccgagtcggagataatagagaccccaccacctcggccaaataagctgcagcgaacattgtcgctgggtcgtggagacaaggggtctgccgagaagcctggcattctcaggcgcctttctacccgtggaccacctcccacgaggacaatgagtttcaaccgaggcgatgaggctgctttcaatcgacgtgcaagcgttgatgtgcccgctcagccccacgagaacggggacagctatttcccaggacctgggggcccggcacctgcacgacctggcagcttccaccggcgaccaacgaatctcagtcaaaaagcggtaaagaaagccgccaagcagggcgatgatggcgcaggcgcctacatcaacctagaaggcgggctcgccatcactttgaacctagagatcagcccacaagacccgtcgggtgttaccacaccctacaaactgctcgtcccggcactgcactacgacgggaccgagtatgacccgcccccaacgcagattgtcaagggctggagaaagttcctaccccgccgcaaaaagaacaatggggaagcagatgcacagcgcgaagcagaagaagattatagtgatgacgatgaccaagacgattacgaggaccacgaccttatcaataatacccgcgctaacgccgccacaagccaacaacatcaaccacagtacgagggatatcctgggagtgaagaggatggagattctgagggcgaagtgcctcaacgtctcccaccgcatatgatggctgaacactcccgcagtcctgaggagcatagccgtccacggaagaagtggttcggcgtaatctaatgtactatattgacgttgggtgtggcattttctttttttttttcgatctgatgatttgtatggatttttattacttgagatagtatttgacgaatgattcacctaaacacgttcataccaacatgtgatgttcaatccacgatctctcaagtacaacgtagagccgaagtatacaacttcggcccggaagaagcgcctcggagtgaactgatccatggatgagattttcgattacatcagcggtctcgacctttcacgtgacatgtgcttagaaagcctcggagcctcgatgctcaacctgattcagccgactcgaattgccttggaattgctctaaattgccttaaattgcctagtttaaacgaattatctctaatctcgcgtggtctggaaaccccagaaagacagagaatccaatcgcatcctgtctgaggatccagtctccctgaatctcgccggtttatcaatcaacttcatcacctaatcccggtctccactgcccctccgaaaaagatattatacctcccctctccctattcctttcccctccacttcccagaaacaccttcaagctgttttcctccgcctttcgtcgttttccctcccttcgatccattgggttgactgccactgcggccactacccttcaccaacaatctcctccttcggcctcggtcttctccaagtcatttccgacgccgtcgcgcgtcaattccaataccgccagaatggtgcactctaaagtagtcagtaagtggtttttcgaggagatcgaatgatccggatcacctagatttcttcgatatcagagttctaaccgttttcccccacagttattggctccggccctggtgcccacactgccgctatctatctatcgcgcgcagagctccagccagtcctttacgagggcatgctcgccaacggtaccgccgccggtggtcagctcacgacgaccactgacgtcgagaacttccccggattccccagcggcatcggcggcgccgagctcatggacaacatgcgcgcccaatccgagcgcttcggcaccgagatcatcacagagaccatctccaagcttgacctctcctcccggcccttcaagatgtggaccgagtggaacgatgacgaaggcagcgagcccgtccgcaccgccgacgccgtcatcattgccacaggcgccaacgcccgccgtctgaacctgcccggcgaggagacctactggcagaacggaatcagcgcctgtgccgtctgcgacggtgccgtgcccattttccgtaacaagcccctgtacgtcattggcggtggtgactccgccgccgaggaggccatgttcctggccaagtacggcagcagcgtgactgttctcgttcgcaaggacaagctgcgtgcctctaacatcatggctgatcgtctccttgcccaccccaagtgcaaggtccgcttcaacaccgtcgccaccgaggttatcggcgagaacaagcctaacggcctcatgacccacctccgtgtcaaggacgttctctctaacgcggaggaggtcgttgaggctaacggtctcttctacgctgttggtcacgaccccgccagtggtctcgtcaagggccaggttgagctcgacgacgagggatacatcatcaccaagcccggtactagcttcactaacgtcgagggtgttttcgcctgcggtgatgttcaggataagcgctaccgtcaggctatcaccagtgccggtatgttcatacttcagcatctcattcatagtaattgcaatttggctaactcaatattctaccaggatctggctgtgtcgctgctcttgaggctgagaagttcatcgccgagaccgagactcaccaggaggcaaagcctgtgctctaaatatatatacaccctttctcctactgttctctcctatttctcgttgtcatgatgcatgaaacatgatgtttggcgcgtgtatcgaggattcttcttgcttctagacttatatctgttttatgcgatatctcattcccaaattccctgtgcatatttcgatgggtttccttacgtctttcttttcttttcttcttccctgatccttttcccatcatgaaagaggaaatcgagtggtctctgtggttctatatcaattggtctgcttgggatgcctatactacccatagaaatagaaatagaagaaaaagagaagctcccatatcatctttaatacgttccaaggtttacaacattaacattctcttacttatctacatgaacaagaccatcagaattaaaactgtcattcattgaaattcattgatatcactaaagctgaaacgatactcataacaagcctctctacagagacgaattaccttctttccccttcttttccctaaccgtctacgcagataatctacccaccataaacgccgataaatcctcatttctcagacttcaaagcaggcacagtcgtaaaggcagtagcaagcacaggcacggaggcatgttcatcaacgtactccggcataacccactcatcaaacggattctccgcacaccaccgatccttaacgacaaaagtcttccgctcccactcagcaatatcaaccttccacttatcccaagcctcggcattagcacggcggttaatctccgtctgctcgatgtacggctgtttatcagctgccgtcgcagaacgccacatctggcctagtgcggcgcggatctcgtcgcgtggagcctttgcgttgggattgtttgatgctgcgcggcgagcttcgtcgcattggtcgcggcaacgcgcccagtagtctttttggtagaagaggaaggggtttaggcctgattttgcggggcgtggtggtgcggagcccagctcggcgtagattgttgtccatagggcttggtcgtaggcgtcgcggcgggatttttcggtggaggttggtttgcgggaggtggaggttgaggggggcttggattgcgtggttgttgggctggaggagagggatgagctgcctcttgttcttgatttcttggtcgtttggccgtttggtgtggatgatttgcttcgagttacttttgacttctcagggacgagtgggtggggcattacgatgggtccggatatcggctcgattatttctgatgctgcgcggaggcctgaaaggtaggctccgtggacggttgctggatgggtgccgcaggtggcttccccggcgaagtggaggttgccgattgaccgggccattaggtcgtaatcgtctgggaaggccttcgcagctacgtaggaatagctgccgtatgtgaatgggtcctggccccagcgggtgatgatagtctctagaggatcgggaattgtagtatgtttgaagacgtttcgaagttggccagtgacctccgtgattatttcctcgtctgatgtcgattctgcttggtgggctgcgtcaccagccatgagggcaatcaagcatgggagtcctgtagtcttcatgacattccagaacagatagaatcgaccgcggttggccgcatagtcttcttggaccatagaagcagagttgttcggctcacggagtaggccaaacatatctcgcttggtgtcccagaatggctcttggaacactagaacgaccttgttcatgattccgaatcctagtctatcaattgcgccacgcttccagtccggaagaggaggctcgaatttgattttctgctgcttcaggaccccgagagaaccggtgaagacgacatgatctgctaggaacttttctccgtcctcgcactggacaactgccttctggttcatgttggacccagttgcgtcgtaagagatctcggtgacaatcttgccggtgcggacatcgagcttttctggcagcatgtacagtccgtagggtaattgctggtagccaccaatgacctgagaatgttcaccttcgaattcgtttccgatatcctggtcccaccctgataggctaagtttgttcacgttggttgcattggcgtactcgaggttggcgaaatgccaattcatcaaccgcatatccttggttgtcaccggaagcatgttctgatattgcttgacaccctcgtccatcactgcaccgagagtctgcgcctgagatgcctcggcaatctggtccagctcaatagtatcgttaacggtgtatcctgggttaagcttccatccagttttctggcaggtcaaggctgccgggtcatcttccgagttccccgctagatcactggccacatcaacggatggctcattttccgcagtcttgtgctttattcctcgtcgaactcgctttgtggggaccaatagatctattgtcccagctgccctggcctcttcgtactgtcgcacagtgagtccgtcatccaccgccgattcgcggccagcatcgatcatctcgcggtttccctgggcggttggcgcgatctttgctttgtgacgatagaatccggttcggtcgagcaaatcattgtagagcttttctgccatcgcatcctgaacctcattcacgggtgatccatcaatatcgtagatcgtcgaaacatcccgtatcttgtgatagtgaagtgccagctggccacgaactatctggtcgagcgggttgccatggtcgaagccgacaatgatctgagcacccatttcggcctttggaacaagcccatcaggcaggttttccgacttgagactgtgcaacgggtgtgaatagatgcgtccaccgactcttcgacgtccctcgaggataatgactcgaggcagggcgtctgaaccacgatactggcggaaaagatgctccaattgacgcgcacaccccagacctgccattccagcaccgactacgacaattgtaggtccctctttccgtcttccacgtttcggtttcaccggggccaatggagcctccacgcatccgtgattgatgtagccatttcgtgcgagccagtcgtaagcaaacgaagccaggttcatccatcgatagtctttggcacatccgagtgcttcttccctggtaacagccaccatgggatttctcccccagagtagcagtattccatttcgtatgttgaggtagattgtgacgtgaacgtggcaaaggtggtcttgcaagaattcttgttcttggcgatggagagcgtacgggtttagccgtgatgcatacgccgctctaacacactgctcgccgtaaacagaggggtggattttagatgggatggaggatcggggtcgacatttagacaaatcaactttcccgctttccagtacattcggtccaaagataactgaccgtgcagaaaaagtttgtaggggattgggaggaggtgatgtagatgcttttagctcaaagggagatgtcaagtcggtcgaggttgtcgactcattcggggtactgctgctgccaccggcatacagcctgtccatcgagccaacaatatggggtccatcagatttgaaggtctgcaacttggaattgttgtgttctagatttcccagagcaattgacgctgaagctgcttcgtaagccttgtgcgtgatgcgcagtcgcttcgcaggaggttcaggtagttctgtcggcccagatagaaggtgttcttggctctgcactgtgatctcggggtttggaacatattggttcatgtatgagtcttgactcgggggaattccaccctggaacttcaaggacgctgcgccatacatgttgatacacgggtatctgcaggcagctcctcaaaagagatgtgtctcaggacggtagaaaaagaaaggagagaaaatactacgtcaataaagacgtagtttgtgaactcgaagatgtgatgtcgacagtccctttctatcccgagaatgtgtggatatcaaatattcaggcgttcacccatgatatggtcataggaattcgatctgtggcaagccgaaggagcacaggctgaatgaatgaatcaactaggattatgttagatgagatgtaatatggtaaaaaggacggagtatgggagaatagatctgtgaagaagaccgaggaagcacggatatcaggacatacatcgagattcacctccacaaaaaccctcccaccgaattgagaataaagcccattaaagagagcaaggatattgttttttgaaacgaatggtacttgtaattgaagacacttgatgaagggacagtgatatggagtagaaaaaccctggcttgattcctcggagcggggcgtatttctcagtccggcaggttgcggcacggaagttcgtccacgtccaagggctctctctcttaaggagtaacgtttcttcatcttacgatcaatatcaggattctatttcatttatttggttatttttgaacatgagtgtgcagaccatatgcctcttcttcccctgcgaacccgtccgagtcattatcggtgaactcatcgtgatatgacctcctcgagtttttccaaggacccggctggtcactgtcactgtcgtcacccaagaccaggtcaacattgtcatcgtccaaatcagtgaatccaattcgctcttcttcatctcttgcaagcgtaagagaggctttgttcacatcaggatcttccgaaaacccacgatgagggcggtgcgctgcatgatcagcttggagagaacctcggatatctgcacgctcttgggcttcgagctcttttgcgcgggccaaagttctaaaacagggaaaagaaagggatcagcatgggtccacaagatattaacaacagatgaatccgggggctcaaacctttggtatatataccaaccggtaaagattccaataccgactgtaaagataatactgcagatattcacgaatttggaccccgcactcatctcctcgcccttctcggagagcagacgtatccgactaccgatgaacgcaggaaccaacaatttgggagagatgatggccgtcgcaagtccgtacatcaatggctgcaccgtaggaaatgtggacacagctccgttgcagattgagtagggcaacggacataaacggatcatacaaagaagcttgaggccatcgtatttcaatgtcagggccaatgcggcgaacctcttatcatgttccataaggcgtttgacgaatccagacagaattgtccgcgaaacataaaacgagacagtcgacccaataattgtggcggaagcgtagatcaaccatctgtagaagaaaaatatcgagttagcctcctgctcactgtttttgccgatatagtaaagcaacatgaatcggtctcttaccctttccacaccccaaatataaaacctgccacagtcccaaatgtagaccaacctacaagaggcgggaaggagacgaaaaacacacacagccacaggataaaggcggctagccaagacgtctcccacttctcagcgaccgggccaagccagatgaacaacttcccggtcaacaccatgaacgcgataccggatgcgcccacgaagagggcagcgaagacagttccgactttcttccatagggtcatctcctcccagatattattcatacggacatataactctgtcccgcgctggattatctgatcgcggtagcttgtagcctgcgcgctcgacctaccggggtttcgcctgccggcgcgactccagggcggctgagcatcactgccaggagaggaagatatgggatccggagaagagggtgaaagagacaacgccctggcggtggactggtagtccgccggcattgcaaaatgggtatagtcccgggggtatcaatatctggtaggaggatggtcgaatccgggaaaagatgaaccgctctaaaacagtgaccgaaagtgcgatacctcaatagatgaatattcaaagaagttccaagggcgtgttcaatgccctgatggatcgaacatggaggagtaagccaagcactttcgggctgaaaatcactgaaagtccagattgcaagtcagcggatccgccggacttgagctcgggttgatctacatgttccccaggttgtttacgttcgttgaatctcaaagtttatgttataagtaggtgactatgtgactatccctatataactaggtatatatttgtctatatatttgtatctatcgtgtccatcggatgttggggatgatgctatacaagtacaactcatatgtacatgaatcttcctattgtctttatttgtttatttctaacaattttataattctcttcacatttggttgtctccttattatgtattatattatcttgttaacaccggaattgtaaattccacgtactcccatagtgtcacttcaagctcagccgataagctgttgtgccccggtgttgatcccccttctccgcctccccctctttgtcacttcaccctttattcaaccttactttcattcaacgatgcgatgtaattatctgcttgtcatttatcactcttgcaacttttatctccttctacaactttgaaaccaaccctggtacccctatcgcccttccactttcacaatcacctggaaagaagcatgatgtgcctctgattcccgactctggtctgaccttttgtttactttcgtcgagcattttcgcacctattgcctagcttcggacaccccatccaggacccaatcccttcaccgctagggtcccctccagatccctttcctccgcccgtgttacccacatcagcgtacaccatggtttccgacgagcttcttgaacaatgtctccagatcctgcaagatcaggcactggatgaggaagaacaagtggaaaaagtggaggacttcttgcgcgcaaacacgtctttgacaggtacacctttagagaatgcggtattggacatcctctggcgccatcgcaaccgaaacctgccagacgcatcgcctccagttcgccataccgtgattcgccgctcttcgcccgcgccatggcagatggctcgatcatccacaccgctatcgcctcattcaactttaggaacaagccccgggagtacctcgtggatgcaaaactcccgtgggccattctcgcggcccccgctatcttctactgtctctccgtttacctccccacgtccatcgccccggcttgcccttgcgcagcctatccctcattctccaaatctgaacgcctacgagttctcggaccaaagccagatctctgacttctatggagaccttgggggcgataacaacgttgactggctagtcgcagatgatgccaacagtacaacatcgtccacgggcggggttagcacccccggcgcacttagcgccactgctgttgaatttgttccggatatgagcccacatgatatcctgcgcacggtgctgggtgacaagcgatcgaatgatgaaatagaagctgcactggaggctaacagttatgatctcggtgccactattgcttcgctctcgcatgatatagaatccgaggcgatctcaaaacaacatgatgacggtcgtgttttggttggcaagtctatgacgatggagcaagtacgcccagtcacgccattgggtagcagtcgcagccctgtggtctgtaagtactggctgtccactggtcaatgccttcgagcggattgtcgttttagtcatgacctaaccacacatgtgtgcaagtgagtgtttttgaatattctggataaaccaatccttctttaactaacaaacttgaataggtattgggttatggggaattgtctagccggtgatggatgccccttctcgcacgatccttcggcgcttatcggcaatctcagtgtcacggatggaagtcgaccagcttctccctctccgttccaagtagacagcggttctgatgcattcccacccctacaagcggcagataacggtgatcaatgggcaaatcagtatacaggtcggtaccctgcccatctttctgcttatcaagccagcaaatatgcgcctcctggcctccttcctggaatgggcaaaagaaatggaagcgcaactcatctcgggcgccccaactcccgtccatcgagccgccaccagaatcgggagttgaatcctgccgcaccgtctgtagacgatccagatgccttcccgactcttgccgcggtcaatgcgaagaatgccgggaagaagcatcatgggaaacggggcggtcatagtaaccgcgaaaccagcttgagcaaagaaagcgtcccttcatctctggcggatgtagttcgaatgaccccatctcctgcccccgggaaaaccaaatctggctccagaaacaaagaaaccaagggtcgcgagaacagtgccgcagcccagtcgattccaccaccgcaaaatattccctggctggagacgggctcgcgggccaatcaacaatatataaaataccggacagaggctattcgccatggcactgtgcgaaacaagttcctccagaggtaagcttccagccagtacaattaccttcaccacttctaacggtcgtatctagcgctgcccaagcatggaaccgcaatgacgcacgagctgccaaagcattgtcgttgcgcggccaggccgagaacgacgcaatgcgcaggtgccaccgggaggctgcacgccagctttacgaagaacgcaatcaacatctctctcacaagggattggatgaatcttcggaagaactttatgttgaccttcacggtctccacccagaagaggctatcgaatatctcgagaagatcctgctcaagcatgctcgagaaggccttcgtgtggtgtatgccatcacaggcactggtcaccactcgaagaacggcaaagataagatcggcaaggccgttaaagcatggttaaacgagtggcgctacttgttccgggaattcagtgtacctggtgagcgaggcggttacgttggagggattctcggcatcgatccaaccagttatgacaagacagtagccaaggagctggctagtgaattggtgggggccaacgctggcggagagccttccatcctgactatgggcaaaatccaattactcaagcgcgaagaaatagaaactcaagatcaatgaccacgctaggtcattcaactcaatttgcgtccaagcggcatgataccccagtaccaaatctattgaatcctttgataagtcaacttgttccaaccttttcgcgcaagtctgtgactcaaccacagcacgcagaaaaccccgccaggcgaaggtatcgagttctttaagcaatcctttttaggataaattcttcttggttgcatgtttctatgtatttagatggtctcaatgtggctgttacaactagcgaggcaaccgaatacaatctacagtaggaaaaactctctcagggaaatgattcaagcatacaacatactaggatgtacaacatgtacagggatatcatgcatagatactacacaacactacatatatgaaccacctactctggttcctgatgcttccactcagccctcaaagcatcaacatcaaccccacaagcctccgccttcttaacaatagccctagccttatgggcaacaggaacatcaatcatcttcccatcaagcgtccaagcacccctccccgccttcgcagccttctcatccgcaataacaacccgcatagcccactcagtctccagcgcatccggcccaaagatctgatccgcaatcttcacctgcgacggatgaatacactgtttcccattgaaccccaacctgcgtccatccaagcactcctcctgcagcacggcgggcggcgacccatccccgttttctgacttgtacgccgtacagacgaggtcaatcgtcgatggcagctccgctgcccgcgcagcggtggctatcgcagaccgcgcgaacagaaactctgtcagcgagggcgtccgcgtaatgctcaagtccagagcgaagtcttcagctgcgaaaatcagtccttggagcaagggcgaagcggcgcagatctgagataagttcgtcagggacttggcggactcgactagagccaggagcgagattgggattctttctgttggaggctgctgggatagagtgtgtgttatgacgtctgtgacgaaggttaggtcggaggcggagttaacttttgggattacgattgttgttaggtttggtgattgcagctgggacggttagcaagttgatcgttgtatgggctatttatgtctgatgttgttgtctgctgtctgttgtctggaggccactcacgacttcggtcagatcgcccagtgcgagtccgctgtctacggagttaattcgcacggcgcgttcccgaattcctgctggtgcggcttggtcgattgctctccgcactagggagcgcgccgctactttcatgtgcggagttacgctgtcttctaggtcgtaggtgacgcagtcggcggtcagtgagcgcgatttgtctaggaagcgttgggaggagccggggactgtttggtattgtttgttagttttgggtttttcttttggagctcggagcgaaatgcggggaagatgcgatgcggctttggaaccttgggagcttgagcttaccgtagagaagggaacgacggagagtattgcgagctgccattgtttatgcgttgattcgtgtgtgcattcaattggtatagagttgtgtgctgtgtttcttggggagtggaggtctttatggagtcgacttgatcgggaagaagccgactcggctacctaggtatccgtaaagccgcttcggagtatgtcccacgtaggaggttagcagagtcgatctctttctttttcttttacttttttatgagctgatgcaatttatgagtttgtatagaattggccatttctactatgcttgtaggcagttcgttacatagggaccattctgtcattctcagtagtcaagattgatatagatatattttcgcaaatcgatgcgtttcctacgtgtgtacatgcaggtacattaggagttgaccatatccacgcctgtcatatccatgttgtacttcttggaatatgaggacttataggactaacgcaatgaccgcttttgaggccagaaacggctacctttccccctcttgttttcatcagatatagaacccaggtcttcctttggaaataaatccactgcagaaattaaaaaaattaagcagatacagtctaaatttggcggtttgaacaccagaggagttctctacaatcgatatatctacctgtgtgcttcatcctctgctgcttgggtactgcgacgtgtcttctccattgctgtggtgcagaagcatacaacatatagatcaaacgacctatacgccttatcggcttagcgccacgtacgttgccatgggcatagataactggacgtgtggctggcgggtatccactcagtgtaatcacgtgaatgcttctagatatgtatagaagtaggaatattgatcagatcttcgtatagaccctctttagtaatctgaaataaagatctttccgccatatgctagataaatggcgcttggttaagcaaataatacacatcgttgacaaaactacggagtacttgcttctgcctgcaattattctgccacaagaaaccgcctgcacccgtgtctcgaccacatagggagcatcatcagtcaacaacagacgtaacttggatcaaattgacccaatctgctgaccgagaggtcctttacattcagatcacatcaaaccttccaccttgcaaatatggaccaaggacaaggaggtcaaggtgacctcaactggcgccttagcgcgcacccgatcacgctacttgtcttcttgggaattcggatcggttcgtgctcccccgtcccgaggaacagcggcaagaatgatttgactaacttggtgattaggtgcgctactgatgtatctatttggtgtactcttcatcgatgacttgtacggaacctgcgctgttctacccacctatcaacccgcatgctaacctccatctagtatcctcgtcttcattttcacccttctcctcctctctgcggatttctactacctcaaaaacattgcgggacgccggctggtcggcctacgttggtggaacgaggttgacacctcaaccggcgactccaaatgggtcttcgaatcatctgaccccaacgttcgcactgtgacagccactgacaagcggttcttctggctgagcttgtacgtcacgcctgctctgtgggttggccttgcgatattggccattgtgagacttgtgggagttatttggctcagtctaattggtaagctactcccaagatactctgatatatgccgacactagggattgactttggtctagttattgcactcatcttaactatcacgaataccatggccttctctcgctgtgataagtttggtcaggcctccacatatgccaactcggctttgggtggtggtattgtgaacaacatcgctggtggcctgctgggcaggctattccggtaatggtacacaggttgatgtctgtcttgccgttagtggccctatatcgtctttcctttgcatgtgctctgtatttctagcagaatatttgaccacttaccattcaaatgcatgcaatctcttttcgaaagatggaatctcatttgtagctctaatgtgatcgagcatccagtctagtataagttgcttcctagataaagctcgttgcccgaggcaggtcaatacatcgctccttcctcaaacaggcagtttcctcaaacgggcagtttccacctcagcgtcacttgccggttgtcttatgttctccttctcctgttccctcttcctcttagtccttttttcttccttctccgtctaccttcaattctcatcaacaaacagccttcgcgtctactgcgcatcgacaaccacgttggtaagtgtcattcttcgcgttgactttgcaccgcctctctcgatggtcctagtagaacgatccacgtgaaaagatcgtgtttcgactctcctgtgatcttgtcttatctgtctctctctgccttctctcacgacttcccggtccccatctctattcattcctccaccccggtgaaggagactttcacaacggcaatactgctttggtggtgtgtctaacgaaagtgtttatcaggttgaccaaaatggagaatatccatggagcccacgacgatggcttcacctgcggacagtgagtccccccaataatctatatttcaaggcccgggaaaattttccaggaaacccagttactcacaaactcaggtgtggtaaacctggccacatgactcgccagtgtccgaatgactctgttcctctgggagctagagacagcaacgcagggtaagttggtcttgcactttccatgtcatattgtgccagcccatctaaccaatactgaaatacagcaatgcctatggcaactacaacgacggcaatggcggaggatacggtgaatacgccggtggtggtgggcgcgcttgctacaattgtggccaagaagggtaagtcgttgccctctatgtacttgctaaattgtactgatgacaatgcagccatagcaaagccgagtgtcccgagcctcgcaagacgggttcatgcttcaactgtggccaagaagggtgagctattattgaacatctcatgtgttacgtcgttaattgatttcccgaaacagtcactccaaggccgaatgcaccgagcctcgcaagacgggtccttgcttcaactgtggcgaagaagcgtgagtcgttgcggaatgctttgtactgtactttgctaattgacttaaaacagtcactccaagtccgaatgcactaagccccgcgtgttcaagggcacctgccgtatctgtgaaaaggaaggtcacccagctgttgattgtcccgagagaccccccgatgtctgcaagaactgccagactgaaggccacaagacgatggaatgcaaggagaatcgcaagttcgatctcaatctcgttgctgacatgcttccccacgaagcctgggctgcaatgaagaaagccagtgacgaaagggaccttgatgatttccgcgatgtaccgaaaaccccatacggaccttgaaagttgtgagctttggctgacctaactccaggcactcaagatttactccaaggctgttccccacgccacctgggcggacattgaggagaaaatgagagatgatgacttcaacatctacatcattgctatggtaacctatcactgtcgtttgataattcgggatgaattactcatgaatggatttttactacagaatgccgaagttgacgatgtcatgagccttatcgatcttcagggagtccttgatcgtgagtacgtgattggattctttttcagctcgaagccgtcgcgtggccacctccgagaccgttggcctgcggatgccgatgacaacctcgaacgcatgaacaacgctggtatcccctacgagcgcaaggtgcctaagtgtctgaactgtggaggtaggtgtttgctttgattgtagtttcccaagaacattgctaaaccattatgtctagagttgggacatatctcgcgcagttgcaaggaggagcgcgcagatggcaacgatcgtacggaaatcaagtgctcaaactgtgatggggttggacaccgtgtgcgcgattgcagacagcagcgcaggaacaagcatggctgccggaactgcgggtatgtggctgcgacgcaaacaatgaactggattacgctgacttctgtgaagatctgtggagcatattgcttctgagtgcaccgagccccgatccgcggctgatgttgagtgccggaaatgcaacgaaagtattacgagaccttgaccaagaccatgcatatatttcatgatgctaacctatctgttttagctggccattttgccaaagattgcccgaatgttgctgatcgtggccctcgcacttgccgcaattgcgggtacgttgaaatactataatcggagccctgggattgccactggtgctaatataaatgcagttccgaagatcatattgctcgtgactgtgatcaacctcgtgatgtttccactgtcacatgccgcaactgcgagaagagtaagtgttgtgcatgccatggaagatttccttttctttggcggaacagaactgacaactactattttagccggacattactctcgtgattgtgatcagcctaaggattggtcgaaggtccagtgcaagaactgcggcgaaagtgagttcatcacacatgtgttcttaatacttgagttagtctgctaacagccatttagtgggtcacaccgttgtccgttgccgtcagccgaaagataaggatcctcaggacgaacctgccttcccccctggctcccctcaacgtgaagagcctgatttgctcggcccagaggcaaagggggaagcgttcgaattcaagcgcaacaatgacgacttgtggtaattctacatttccatgccgaaatgggtctgtggggctttaaaaagtgtcagaaatttggcttccctttcccccttgttgtgagcggccccatgtggaatttgtcgggtgttgactattattgggaggccttacggtgtcccgatatgggcaagagccgaatgttacacatggactcgctgcttatcggttccttcttttttctttcctcgaatctcgcgagtgtatttgatgttagttagggttctacccaggagtttcacagtgattgctgaccggccgcgggtctcaaatggggatatttgttaggacctttcctgctctgttgagctcgatttgattttgacgccgtctccggatgagcctgaggacagagggtctgggcaggagggctctgatctggggacatttctgacgttcattgttatctggctggcaagttcaattgcaatgaaacatcgatttagtgcattcttcttggctgtagagttgagtaagatcctgtgaagtcgaatgcttgctaggttgtagtaggattacagaaataagtgtatgacggcaccaaatcttgagttagacggtaaaaaaaaatgccatgtgtcctgatcccgactttatcacggcattccttagttcggcctgatcaaatttcccgagtcgacgctagccaagccggtttacgccaacttgggtaaccgtatgccatgattccgatgacacgcgagcgccagtgagacttccgacttccgtcgatcattgacaattgtttcctagttgatcgtcgttatgagcatggtcagggctacttgagtcggtaccacatgtatgtatgtgtatttacctgtcattaccgggatgtactgtggatcgaatccgggattccgccctaaactggccttctctctatacttgaactggtaagttttggcgggattccctttgaaaatattaccatgagtaatagttgctaggtacctactattgccactctttttttccaatgacaaagtaccctcatactaaagcctaaactgcataattgggtagcatcgcgtaaatacagagttgcagtttgatacattggcatctccgaatcgggcatcccgtgttctcgggaaccccgtgattcggcttgcgccgaactacagaaatttggggacgcttctaaaatgcccctggagtccagagacttcgatgaaaaaccacctaccctttttggacatgggattaattgttgatgatgtcatcgctggcttcggcgccgggaactgattttcgggacctgatgtcggtccgccgtgcggcttatatggaaagttcgtgaaccccttgtcatccctgccaagcctgcttggcgaacgggtgcagaaaaggtaaatatcacgtaatgagcgcaaggcaactgtgctttgtagtccgagttcttaaagtcgataatatgttgtatgttgtatgtggtccttttcagcgaagatcagcggagtaaaaaaaaaatggggggagtccgggggaacctggagaatctccaggtttttgtcaaatggcattccaattggaaaacaaaagtacctgaaaccacgcgaaactctgtgactcgtgcagttgtcatacactccatattcgtcgacggaaacagagtcggaaaagtacctgagtctataagtccatgggtaccttttcggttcaaatgttcgatgccacgagtattacagtaccgagacagaataccgtacagttagtatgtagtaataccggacggagattccatgcgaggggcttcgcatggctaaatgcacctttttgacgccgactgcctggtggatcctgtaaaataacctggacatgttgtactcggccgcgaagacggaaagtatagttgcgccccccaatcaggcgatggaatagacatcatcaatgcaaccttggccctacttctcattggcttgtctgttgctggttctgagttccgatttggttccaaagtatatgatcattcgatgtggatctccccagggctccttttgatggggtttataaacgactaccctacctaggtagagctcacttggatcttctcttctcccgcttagtccactcagatcccatttctagcaaatagtcggactcacttccttttcacctgatccttctataaacaacctactcacccatatccggcatcatgaagccatacttcggccttcggggcacgaacctgaatatcatgatcggcgttattgctggtcttgattttctgtatgttggtctttcacttatctgtcgagacacacatcactaatgtggaatttcacaggctattcggatatgaccagtatgtgaccagaagctatacatgagagatcgagtggggctctcttgctaacaatcaacagaggtgttatgggaggtctgttgacattgaactcatttattacggtcttccctgaaatcgacaccactaaatcgagttcatcgacaagtaacaatgcgactacacagggtacgtgacttcatcggaaccttatattcattcataactaatgtatcaggaatcactatcgcctcttataacctgggctgtttcctcggcgcagttctctgtatctgggttggaaactaccttggtcgtcgtaagacgatttttgctggctccatcatcatggtggtcggggccacactgcaggcctgtgcttactcggtgccgcatctcgttgtcggccgtattgtcactggtatcggcaacggcatgaacacctctaccgtccctacatggcagtctggtaagtatttggctttgttgaatatgaagcacgatgcttatattacttagaatgctccaagtctcaccaccgtggaaaacttgtcatgttcgagggctccttgattgctgctggaattacgatcagttactggcttgacctcggattctccttccttgaccctagctccgtcgcctggcgtttcccaatcgccttccaaaacgtcttcgcgctggtcatcctagtcttcgtgctgccgctccccgaatcgcctcgctggctgattctcaagggccgcgaactggaagctttgcaggttctctccgcaattctcgacttggatgagagcgatccctacgtccactcggaattttccgctatcaaggatgcagtcctggctgcctccagtgtcagtttccgtgacttgctcactatggacgagaaccgccacttccaccgtgttgtacttgcctacgtcaaccagatgttccagcagatctccggtatcaacctgattacttactacgctgctaccatttacgagaactccctcggtatggatggcctgacatcgcgcattctagctgcctgcaacggcactgaatactttttggcgtctttgatccccatattcattattgagaaggtgggccgacgagttctgatgctgatcggtgccgctggcatgtcgatctccatggccgttttggccgccaccactagctttgagggccagagcaagcctggtattgctgcggctgtgttcttgtttgtcttcaatacattctttgcctttggctggctggggatgacctggctctatcctgctgagattgtaaggctttcgtctctttctttcccaacagaacatcgctaacaatgccataggtgcctctacgtattcgtgctcccgccaacgcactcgcgacctccgctaactggatcttcaacttcatggttgtcatgatcacgcccgttgcatttgactcaatcaagtataagacatacattatctttgctgtcatgtgagtatcttctgcgcgacatggacttggcacaccactgactcagttcccaatagcaacgcattcatcgttcctgtcgtttacttcttctaccctgagactgcctatcgatccctggaggagatggacacaatcttccacaagacaaccagcgtattcaatgtcgtttcggttgcgcgcaacgagccccaccgctacggcaagaacggcgagcttctcatcaactacgaggacacccaggagcacctgcgccgcgctagctatgttgcagagaagaataacaagctgggtagtggaacgggcgacgtggaggctggaaagggcacccatgttgagcaccgcaagcacagctcgtctgccagtagctaagccttttgagaaggccgattctttgctcttgctcatttcaaggacattttgctgatattagtcaacgacccagtaagtatctatatcgggtgctggatggatattttatgaattacggaatacagtcattaagtattgcatattatataaatatcgtgtagatcaaaccttggaacgtatcaacgataagattcaatcacaaatgacccgttgaacttccatgccttaaaccacatcctacccaagcccctcacagcccgaaggccaatccaccaattgcagcagccaagacagcagccaggatgccaatgccattcccaataatgctcacactcggagcagaaccagtagaaccttccccattgagtggacctgcgataatcccatatgtcgaatcaagcgaggaagtagcagtcggagcaggggaacccgttctcaacgtgacagggtccgacgagcttgccagagaagtcgcctcgtaaggagtcgagaacgagtaactagacgaactctccctgagcgaggaagtcgcctcagcgctattcgacgcaaaaacagaaaagacagtgcgagtagtggtggtagtagacgtaaccgtccgaacagtgtagggggcataagaagtccagtaatagaaccaataagtcctataaggaagtcagcaagtcagcaagtcagcggacaatgcaagacaccaaaccaaacccataccagtagatagtagtataataataatcccaatcaacatcaacataagttgtcgtagcagtctccgtctccgtctcagtagacgtagacgtagacgtagtatccgaccccgtaagcgaccccccagacccaatcccatcatattcccccgaacaacccgtcaacggacagcaaaccttgcgccctttatagatacgacacgtcttccccgcgggacagtagtaaccaccggtacagcactgcccatcactcggcgcacatcccgtcgagccagcgcagcacttgtacccaacccgacacgtcccaccgccggtgcagcacgtctcgcctgcatcggcgcagtacccattcccgcagcatttcccgccggtcggacagcagcgccgggagttgtaggcgcattggctgtacccggcgcgacactgcaggtcgcgggtgtttagtggggtatcgaagagggagaagatgtcgtctgtggtcagggtcatgttggtgaaaagctggggtgtgtcttcggtggatgtgctggttgctatactggctagcaggagggatagcactagggctgtgagggaggggagtggggagagcatcttggggagttattaggggtatagtccagagattgggtagcttgtagctgtttggatggcaccctgcttgtgtttctctttggagaatgtggaggttgaggtggaagtgccattttatatatggagggtcgatacatctatacggctgaattgaaggcaaacacctgagagagtctgtttagggttgttgttcgtattcgcgggaatacgggggcatttggcttgtggtggttgggcctgttgctcgcaaatacgaggtggccctgcttggcggactcgagccgctttttttgggttcttttacgggtttcgctgtataggaccaagaagagacttgaaaatgtagacatctaggcttggtagcctttgatgtagatgcaaagggtcaggcggtcttgcggttgaactggtcacttattatttgtagtatttcgtgtttgctgtgcctctttgtcaaataaagagctacttcatatatatataggtagcccttctacttttctcgttatttcttcattccacctacctcagctattttggaaggggaaaaggcactatatataaaggcaagacgactatggctatatacaggtagctttacctgaaaggaagtatatacgcaacttgcacccactacaatcaacaatcacagcaaagtatgatctattagcctacaagacctcagaacaacgcgctagctacagatatggctacagtgcaatatagccataaccacctctcctatttaccgaaatccttaaccagtgagatacactccgatcccctacaaactcagctaacacgaataaagtggccgacactcggcccatcccttcacctacgctcaaccgggagagctctcaaagctcaaagcggacccgtcaccgcacccgcgatcgtggacaaacgagggcatcgccttatggacaagcaggaagctatgatgaacgctttacattaccactggttctatagagatcagctgaagggcatggagaaagatttggagtggcttcaccatgaagctctcgtcatctttcctagctaggaacgtgatggccacgctccacggctgtgttcgtgtcagacttatcaactgcgatgtctatacaattgtgcgtttgactcaaatctctcctttatttcctatctgtttacttgctcccggaagacttctttttacactcacctcattggatcgaaatgtcctatccgtgcgcaaaacatggagtcttaaaacattggctgacggcatattaaacaggatatccaagaggaacaagggaaggaaaagggacacggctccctcgaggagatggcgacacagagcgtgatcacccatcacgcgcatatataaagagtgggagctatttgctctgattcactataccaacacaggccggccatttcatcaccccgccatcggacgttcgactgtccgatgctcccgtttttctgggcattactacgggcgtccccatccgccaacgccatgtccgttggcctgcggactttaactccgatggtgacatcgaaccgcctaggtggccgatgggagagccagttgttctgtggaccttgggttgccattcctcgccgtgtatgcccgattactacgtatataccggaggatagctgtatccgcgaggtctgtatcatcggcgaactaggtattttctttgcgtgaccacgcacgaacctgttatgctagggattctcgaaatcgtgttgtcattcgatgggtgcaagatagagattgggggaggatgagtgttgaagggggcttaagcccaaagtatgtaagagtgtaattcattggaaaagcaatacgagtatgatttgtgcatagtggtctccaaggtatccaaattatcaagatacacatcgtgaagctggcacgagatgcgtaaactaatatagagacggtttcttcctaactagactaacaaggcaagatagtagcaactatgcacgtctttgtccgtccacccaaggagtctcgcagtaatttcgttattttagattccctgtccgatgtcagttctctttctgaatatatctacgactagcccagtccaagcttgtttccattctcagctcgtaccatgatcgagcttgctactgcatcgcggtttgcctcttcgctactgtccaacacagtacagcttgttcctattcatggataacttttgtttcatcccctccagaccgcaagcggcagacttatcaactaatgcattgatgacctgtccaagcgttagcaagctctagggatcttgagggagacttaattacctgtgggtactcgcccgtcgcgatagtcagttctctcgcaattggaggcttcatgttcttctgcctcgcggggcttggtttcaaaccgtttaagacggcaatgccggtggcggggagctgcagccttgcaattaccgctgcgtgtcatccggcctttgatccaaacgaagataagagtacagtcggtcaatgggggcgaggatatggggtttttgcctgttaagtgggggtcggtactggtcaatggccgtgtcggacattgcagcttcacgtcggaggatgccgatgtgcccaagacggtaaaaatatgggatgttaagggtcgacatcatgattataatggactggcttatcttctgtacatcgagccctaacatcacccgattagtctatctgagagagcacgtgatagccccgagaccggcgatcaagatgatgctaatgagaatacaaaaaagagataacttgaattctaaattctaacaattgtaagaattgcaattgctagaatttcagtagttctgagtcattgcttggtgtgctatttttgagtgttggatatggctgaacagtgtgtttatagtatccatagatgtttatagcattcagacagcttctgacagctaaaagctctgcaagggactagagccaaagtagaaatataccaatcaaaacaccagtgcatacatatatgtatatatagaacggaccatccataggaggtaaagatatcctcgggaaagaaaaaaaaaaaaagatttaaggttatcctcggtgaagagctcgggggctcgttgggggaaaagggaaggattttccctccacctcaacctcaatattaatctcaacgggcattttggaatttattctcggatatttgggtctatgagtcacgcgattcctagtctaggactataagacttcccttatatatcgagagagttcaggtgttttctctccgccaagatccacccctctctctttatcagatccgaaaacggaatcttcctttttctcccgtccaagtcaacgtatgtttacctctgacctcggtaaaggactccgagagaaattgatacatgaatttcactgactcataatccacagaactccctctgatatctggcctataggctattggtgtccttcaattggcactgctttaaccagcgcttaggtacagtcacttgactgcttgcccgcaaagaggccgaataaaaaaaaagagtttatacacatataataataataaaacgacaacatgtccaccgaacatcaacatgcctctgttggtatcgacaagcaacctgtctccgaggacatctccgagcagccagaagcgcctcaaagccagaaatcctcggacgacatcgactccgaggaccacagcgtggccaacattgaacgaatctacaggtgattcgcacctccaagagacattccaatctcaaatctaacctggaacagaaaactggaccggcgcatcatctccgcattttggatcctctacttcctctgttcggccatccggtcgaacgtaggcctagcacaaacaatgaacacagacaccggccatgacctgggaagcgtgctcaacctaacccgacaccagatctcaactggtctcgccctcttctacgtctgctacgtgatcttcgacctcccctcaaacctaatcatgacccgcctaagcccccacgtctggatgagccgcatcgtgatcagcgtaggtctaatcggaagctgtctcgccgccatgaaagcagcctggagcttctagtacgtcaacccaatcaaacccttattctatgtcataacgtatatctaacaaaaacctagtctcctccgcctcctcctcggtatcgtcacagcaggcatgtggccgggaatgacatactatctaacgctattctacccgccctcacgcatcggcaaacgaatcgggcaatacttcacagcctcacaagtctccgccgcggtcgtcgggctcgtctccgccggcttccaaaaaatggacggcgcccacggcctcgtcggcttccagtggatgttcctcgtctacggcgtcatcaccgtcgccctcggcttcgctctgctatggtggctaccagacagacccacgccgccgggcgaacccgcgccaaaacgcgcccggttgttgcgctgggtgccggctacggcgcctgcgctgaaaggcgccgatgcggtcgtgcattaccatgacctgaagcgtgtttaccactcgaatgcgtggacactgcgggatctgcttgcggtgtttttggattggagattgtatccgctgctggttatgtactttggtgttgtgggtgttggtattggcgtgcagttgtacgcgaacttgattatcaaggctatcgacccgacgttgagtgatgtttctttgagtttgttgacggctccgatttggattgtatggtttccttttcctttccttttcttctcttttgctcttcttttggctctccaagttcccaccaactaacacatcccagatggacctcatcgccatcctcctagtaacacccctctcagaccgcttccaccgccaccgcgcaatcttcttctcaattcccgtcctcctacaaatcctcggcctcctcctaacaacctacgcgggcacagacgcaaacccatggccgcggtacggcggactcctaatcgtcgggttcggactcggcccaacagtcccgataacgatgacctggacgacggagatattccagcctcgacacggcgaggtcggcgtcgctgctgcgtcggctgttgtctccggactcggtaatctgggtagtatcctcacgacgtatgcgctgtattctgggtggaagagtgattacgaggcgcccggccgtgagaagtataggaagagtaaccttgtcatgattgggattctggcggggagtattctctctgcggcgttgatggaggttttgttgcgttttgttgacgggagatatcgtggtgatggtgttgatggggcggttgatggggctgcgaggcgggaggtgcgtcagcgtggtttgcatgggttgggggctggtgttaggcgttggttgaggctgggaaggtgagtgctaggtagacttctctgtgtatgttgtggtgtggccgtggtgggatggtaaaagtgttgctatatttctctaatgttgctgctgtgggggacttctatagaactaaaagggagtgaatacatctaatattggacctacacttttaggatattttaggataccctgcttcccaagggcaaaactagtcaattaaatgaactgaagtattccacttccatgctttttgacgttaatcatgctcggccattcgagactgtcatacactccatactctgcataagagaagaagaagacttccattggatgctgaaatgtgatactagattgagttcaagatcctcccatgtgtcacgaagacgatctggcgaggtactctaatctaataagaccaatgagactaattcagaaaagtacaaagagttcaggttgaatcaaacacgaaaattactccaaggtgagggtcagtgcaaaattgttaacttggtattaattgtcgattctccagaggaacgatatcagtatgatatctctcgataaacgatggtgcggtttttcccatccatgaatattctatgctattgtacgtgtcacattaccctgcgaagggtagtcgagaggaaacagaaaaaaacgaaaagaaataagtgcggctggtgcaacgagggagggccagcaggacgcaataggcggacactggaaccgggagaaagaaaggacagaacaggagaaggaagacaggaagaggaagagagaaaaggcagatcacagagcatctatgggggctccctcacacagtcaggccgctctggtccgactcccaggttgacgccgagggtatcggagcgctaagaccaaatgattccttctatccatttaaaggccaccacacatagtctcaacgatgataccagtgatctggtagggatcagcgttcgacgcggggcggcggtcctcgaagtatcccttgttatctttcgcgacctggcgcgggatacggatggagccaccacggtcggcgacaccgtaagagaacttatcaatgttaccggtctcgtggcgaccagtgagacgctcctcgttaccttcaccgtagacggcgatgtgctcaacgtggcgggcctcgaacttcttcatggcggcctcaatagccttcataccaccctcggcacgagtggcgttggtggaaacgttggagtgaagaccggcaccgttccactcacccttgatgggcttgggctcgaaagagatacggacgccgaactcttcagcgacacggtggagaaggaaacgggacatccagaggtgatcacccacttaagaaacagttagtctcgtgatattctattgtcggggggttccaaacttactgtcgatgccagggcaggggccgacctggtactcccactgggagggcatgacctcagcgttgataccggagatgttgataccggcgtacaagcaggcacggtagtgagcctcgacgatatcacggcagtagaccttgccggtaccgacaccgcagtagtaaggaccctgggcaccggggaaaccaccacggggccagccgtaaggccatccatcagtaccgaggagagtgtactcctgttccagaccgaaccagaagccctcgtgggcgttggtctccatcagacggttggcttcgtggcggtagttgtacttgttagggcttccatcagcatcccaggtctcgcagaggacaaggatgttgtcaccctggcggaaggggtcggggtagtaagccacggggcgaaggtagacatcggagttgtcaccgggggcttggctggtggaggaaccgtcgaagttccactcggggagctcatcgacactcgtgacgggcttgaacagagtctgtgaacgattcgagttagtgagttgttccgcaggagcgctatctcacgtgacggcgggtggctgcgtcgcatgctaaatcaagaatctccgtgcacagggcttatcgagacccgagaggggactctagataagaacatgcagcaaccacgccccacaagcccacagtgtgtagtccccaagataaacaactggggaaccagattgagatgagtcatacctttgtcttggagcgagtgccaccgttggcatcaatccaaacgtattcagcctggatgcgaccacgctggtcgaggttcatgtacttcatgagctgcttcagtcagtatgtgtcattcctcgctggctcaaaggccattgcggaaatccaaaatcaagaatcaaacgcacattccccgtgttggagatgacagttgccgattcggacgcctgtagagagaaaaagaggtcagatttggttctacacacaagagatgaagagatgacccgtaccatagtgaatatggatgtgtgtgtttataacgaagttttcaagcaatgacttaaagagaggatcccgaaggaaggtaaacagggacctcgagaagaaaagcaaattgaatatggatgggaaaatccaaaggaggagagaatgagttttaaagatgtggaggggcaagggagggatgataactctgggaaaagaaaaaaagaatttaaatttagtcactgactttttcctttttgggaatttctttttttgattttttgaattttttggaatttatttcttggcaaaatcaggaaggcgcggctcagccactttctaaataggttagcgttgtattgtgacagtaaagtcgtggcccaatacagggtactgataaagtacctcatacaaactgtgcgcgtagtcggcagtctctctcctgaaaccgggttgttgggggaacagaaaagccctcactctattttagtacttccctattttcaatataacatttttaatgcctcaatatcaaaatagaacaactatctcaacccttttatttttcttttcacaaccgagggaacgctgtagcctgtgaatatgaagtttcaccttttttaccgaattcaacgccactcgctaacttccgtgtcatcatcgtcgcatcatctagacatctttcgccggtcctcgccgagagatctactcttatagcagtttgatttgttatattcgaatctagatgcgaactagcactctattgtattctccgcactccgtactcccgtacaatgtagctcttctccggactttcacctccgcatctttgccatgtctaccaaaccgctcccgccacccgaaccagtcaagactccgtgctgactggcgatagccctaattagtgcccaatcaggccttgtaatgaaactctatgaaatgcactgaaatgcaatatgatccttcttctcccgttggaccgataagatatatacaattagaggcattagttacaggggatgttatatgtagagccgaatatagcgcatggccttccatatctggttcttatcccggcattctctccgaaatagggctcctcgtcttatccgggtctacctaccccctgacatactacacatgttcccctcaaaagtgtaaatatccatgctgagtactccatagatagtcggtgatacgttggtcacgcttcttagcaagccgacgccaggacccttgggccgagcgcatatcagctgcaaatcccgcaagtgcatgaggaactgtagacgaaaaagcaaggtgaattctagattctttttttttggcccttgaattatgcaattttaatcacgcgcgcgtcgcgaaaatagccctcgaaactgtacaacgcgaacggctaagtactccgcggttcctgagatctgcccttcggagctatcaccaaatgacagtagcgcgatttcattatcgcgtggcttgtgagacggctagaacttcttgttttcccaagtacctgtactttttacacgcattatctcttagacctttgtatatctgttcctgcagcaggtcggaccgggtagccgcacatgtactttatcacgcgagccggaccggtatagagtacatcggctatacctctgtaatacaaggtccgcacaaactccgcaaaaactccatcccaactccattgactggagaagccagccacgccgcgtctgggatcgagtcatagtcggaccagtggggtggaccgtggcaaaacgttctcgaaacccccgtcgattcattaattggaccaatcagaccgctttgctaggaccaccccgacaccggccatggataagagaatcaaagcagtattacaggtcgagcaggcatttcggttattcatatgtgtgatttcaattatgtactataagagtcacgagtccgtgggtgattttgggtacgttttcttaggtaagaacattgtagtctatattctcatatgggacagaatatgcatctcgggagatttaggtcagggattctccaaggaagaataaaagtggcgaaagagatcttcttcccccgtattttctccggcaaatggaagtctggcagatgtcgggagtttcagggatctaaggtgagtgagtggctgaggttccgatcttcagccctgtgctttctccaggttttgtatgttgtatatttagtgcaataccagatcaccttggaggcatattcttggagccacatctaaatctgaagagtttcaactgcaggtgtattaatagcatgagacatctagatccgggcttagtcaccggccaagtccggggggctgtgcgtggtactgtgtatctgtatgaggatacaggatgtcgtgtacattgtagtatctataatatgtaaaatgcagttcaaagaacataccacagaacatttcaagcaaagaaaagaaatataatctatataaaataataatatcaaagaaataatatgaaaataatataaatatcaataaaatctcagaaacccccatagatcgacatgcccctttcttatcgctcccttcccattggctcttatcgccagtgacaaaccacgctgactagaatatcgcacattcaactgatattcacgtaattgctttcttcttatttgccggattcgaatcaggtcagatgttccatatctttaggaatagccgaattcccctactccgtataccaacatattttgagggtttttatacgaaaatatgttgcaaaatgcctcatcggaatgctcgaaagcggaagcggtggatatgacacatggatagcttggatcttcgtcagatcgtcaggtttatcatcaggtttggaatatagcatgccaaggttctatactggtttcggacttcttgcccagcccgtacccaggtttagttaaaaagctcgcttccaagatccacagatgaacataaaaaagtgttgcatcataaaattgaaaagatggaaaagttggtttcttgttctgatgatttagtggtagggcttatgacatacatagaggcagtaagaaaaagcctcaaaagcgcccctttatggttaatcacacgaatggtcagtgctaaaaccctcactttcaatccctttctcatgtggatttcaccaaaattcgaataatgcctcataagtcaacaaatggcactggcatggtatcccttgcacctggcagatccattagccgggtaaattgagatctaatgtctcgcttaatatacaatcattagggtccaaattctaccacatctgggcttttggccgatttagtaaaacaaagactacaacattgtactaggtataatgtgatccgcacaggcccttattgacgcccgactcgattaaactgcagatacaaccgtactggtccgtctaggcgcatcttggtattcattctaccaatccagtcaacgtcaatctagtgcaaccttcctgttggcgcctgatcgatagtgtcatgttccgacgacatatgcctgcctccggaggtgtgaacggggggcatgaagtagccattcagacctcgaaagtcacgcacaatgtagacccggggctggccccgcatcatgtccggggcctagacttatctgatcaactctgaaacagcgccggctgtttgcttaggtacacctacatgcataggtaggtatgtatctatttgagaaagctgtggtattttggaaagttccttcggtgtatctttggagggtcgacgaagtgttacattgaaatgtagttggagatggatagtggatgtgacatgcattaagctgaaacagacgtccatagatgtagtccacacacagttagtactccgtaagcatgatgactctgggaccatgtttgtgttttttaaaaaagaaaatacaccacagctttatcttaaaaaggcaagtaacaacagccctctgagttctgttttcttattcgctggaatgtgctatgtgcgatctagatagggagtataaagtataaataccctctcatctccttcacacacactctctgtcgatgttttactatcttggccatcatatcttcgataccaactgctccctatgccggccaggattcgtgggactcccacgtgcagcgtagcgtgttgcttctagtagtctgaggttggctctctccacgccggtggttccgtgtaccatgcagacctaggtatacaaagctagaaaacctttgtaatttgggatcttcaacttattgaatcaatgatagtgttgatctatatatcactagtcactttgtgtgatccagtatttgcttgagactatctagaatttagatattcagatctcaatcaagtaggaactggtgacaagagtagccaaccaccagcccatgcattatatgagtcatgtggcgcttggatggtggagtaccccgagcgcgaactgatacttcagctagcaaggtgttacactaaccacagtatacattgcgaccaacgtacaactgcacctagcggtttgcatatcaatgtcagacatcagtcatgagcaactgcgggactaaggattgccttggtttgggaatacaagaatgttgtatctcggtaccactggatctcacccattgccagcccgctgttgcatccaacgcaatacccactcaaccaagatgctcaggtcttgcgagacttcgagcactttggcaatcttcttttgtacatcttggagccctggatcaaggttatccattccctgcatttcagtgtcaccaccctgttcgctgtccactaacccagcagtatccacaactgagatttggccattgagcccgacttcaaagcaaattgcgatttgtctgggtgtttgaacggatcgcggggcttcggggctctcgtagttcctctgatctgtgatgagcaacatgagagcaggcccctggccgagttgaatacgcaatgtcacatcgactttgacgtcgtccacggacactcggttgggactctttcctccactggagggggttgaaattccaactccagagtcattcttgctattatccgagctactctgaccaagcagcagattcaatctctcctcgttaggatcatcgttgttcaagattatgggcccatcttggccagcgaagaggtctggggtttggacaggaggagcacggggtttttggggggttgcatttgaagactccgtggcgttggcctggtctttaggaagatgaaatgtcttccgaatcagattggctaacacggcatactgccgtaggatctaaaaagagttagtgaaagacaacatcggatgaaaacacacgtaccggaaggatatctgcgagctgccgggggtgcgagaagggtagatcccggatggtgcacccggtgatggactcaaaggattggaaagtgtagttatgctgtttcgtatactgcttgccttccgagtcaaaagcatgcactggcattcggcgctttctacggccaatttgaggagatgagacaggtgatgtcaaggatgaagattccgacaccaacaacgcgtcgtacgtgatcatcttaaactcttgtgggagctgcataccgagctgacgatagatctctgaggctgcaagaataggaacgtcgagtgctggttcaagtttaccaacgaagcgacggttgggtggcgatgactccagcatgctagagtccaacgccatggggtcatggttaccatgggttaaccgcgtggtctgcggaggatcaatccagttcacagacccagcggcaccagttgatggaagcaattcagtgctttcacccgcagtaaaaacttcgctcccaacccactcctttgaaatgcgcagggacggatacccctcttcgcattcaatcatgacagtccatgatctgccttgaccatccaactcgtcctttgagccttcatcatgttgtgcgtcaatctccatagcatccgaagatggtaggctctgcttcgcatccaggactttggcttgctcaacccaatattccaagccgagcccaattcgactccccttatgcatggtggggcgcccgatgacacctgcgcaaagatgctgatactcgccgccgtgcttcccatccttgctttcttccgcccagatgcgcctgaagttttcttcgagattctccaacgcctcaaagcagttaacttcttggctgagtttgtcaagctttgcaagccattgtaaattttcgtggaactcttggagtgacctccatttcccacattcggcgtcttccggggactgtgcgagggtacgtttcaagaccgctgtagcttcctcgcgccgcacaccttcagtgtattcaggcgtggcatatcgtagactgacgtctttgacgacatcctgaccagcgtagaaatcaatctcaagatcgacgaagttgccggcgatgttgagattatcgtcctgccaaatggactcgaaaccttcgagtcgactcagccgttccacactttcacgtgaaactcctctacccgaaactcgcgcccgtaggagctgaaccacctcctcgacgcgatgcctctgctcttcgtcgttgtcgcgcgcgactccgagcttgattccctgcatcccgaggttttggatgtcgctctcgttcatgcccgcaccaacaagaccatcatgcaccgcaggagaaggactgatgccagtatacccaccaagcgctaaaagagccgaaggtgagctgaaattgacagtgtcgtcgaccccactagtggcggcgagaggggttgcgtactgatgggatgagacactcgtttgatgcgcatgtgcgggtcccgagcctgtcggagttctcatcgaaggcgatttatgggcgagtgatcgagatagaggagcggaggatggatggggagaggacaggtgagttggcgttgcgccaggtttggccgagggagtagccatggtagaatgaaaggaatggccagagcagaatgtcaggagtaattggaagttagatatagcaaaatccgtccgaaaaaaatgggtatcataagaagtatcgaagcacagaacacaaggaagccgggtatgtttgaatgcgactcaattctcaccagcgcaagtcgtgacttagcgggtacacaagggaagaactgtcaaattattgtacagatcaagtatcatgacacatccgaagctcccccgttcccgtgaacactgcaattaacaagcacgattcggttccaaagaacatccgaaacagacagctccatcaaaagacacgatcacgtgtttttctgatgtttgcattgtttgcgtccaccgtcacatcttcaatggccccattctgattgaaccgaagtatttgattcatatattctgtcaatagatgtacctcgagatacatttgtgtgattgcctcgctccatacaactttgtctattggaataatatctaacgagtagggggtgggattcatgggtagtgacaggactatgtctgcaggggtccataacaattaacatcccacatattccgccaattgacccgaaagataatattttcacatatttgacacactggagccacatctgtattttcaacccattcaactccccagcttttcttgtgaacaatcgacatcctcagctcctctcgctcgggatggtgtagggagagcttgaccttgtctcggctggggcagtgttggccctaatggggtctcgttctgtcccgttatactggcagggctggtgttctttttggtcttggttttgagtcacaaggcaggatttttccaacaagccaatcttttgcgcgagggcactaggtccacctgttttgatggtgtgagacaacacactgttggctgatgttggggggaaaggtagacatctttagttagtgaacgtaccaccatcgaatgcatgccatggtcttttacctccgggttcagcggggatcctagaattgtcgttatagagcatgctgcggtatgcaccgcttggatggtctgcaatacctcagctgacgcttctatcgtcgtctcgggtctttaatttaccccaatgcgtctattatatgcgtttcgctgaatttatggttcatgggcttgtctatccagggtcctaaggaacgatctacgacatcggcgtgttacaagtgcgggaaggccaagtattacatgtgatggtgataatagcgaacatggcataagcaggggcgaaaactgtcggaaatttagagatcaaggtgcaagaacggagtcataaatagtcaaacagaggaggaagaaaaaaggatattggaaaaccccccttaggtgttgcaaattcctgagattaccaggtagcccacccctaactgacctccctatcacgactaggtcggtcacagctacgaggtcttattcaagggaaagcgactgccctatgaggtttccatggaaagccttaacttttggttaatctggacaatcaaatggccaaggtccccacacctctcaggtcacaagtattcaactatcaatgacaatatggagccgtctatcctttctcataaatacctaggtatggtgggacgtttactttggtagattttaacaataaggaaattcgggaacaacacgggagatcccgagtggagcccgggagaaaccgaactttatttttgaccaccccatccccaccagccattggacccttccagtctggtggacccgtgctcggggtaggcacatggataggccgcgccgggcctatgtgtaccgcctttctatcaacctgaatactgccacccacacgcgaacatgtccctaccttcgaggcactctttgcctttagtgtaagtattactgccctagcgatacttgtattggtagtcaaatacagtccgccgcctggttcccacatacatacctccacccttctttaacctttcccatcgtgctcttcgccctaaacaccataggcatgtttcaaaaagcccaatatctggtaaagctctatccagcatacaaggtggatgatttggcaaacctcacacacatagaggttctattttggcggtaaacatgtcaccacgacgaacgatgcgccacggaatatgcttcatccaaccgtataccgcttagaactcgaggagccccgttttgaccttccagaaacagtcatcgtcaagcaacagaaaaatggacgggaatatgagtttcccaatgaaatatccacctacaagtagctacaaaagcttcaaggaaccgtgatcccaactctattcagtaaaggctccctcaatgggcgtccggccttggttctttcagaggtctaaggtactactttgcccggtcttgcgaaactagtcgaaacaaatgtggagataaaactctagagttgagatagctttctaagagctctgcaagaacaatgccgagcatcatgacctgaacctgggtaattttctgtcctgcgataatggacaagtggtggttaccgaccttgaagatgtcaaattccgtgatagaaagcaagcttgggagtacagcgttaatctgggcagcatgagtttcctgatgagcggatttagggacgtgagatatccacgccgtgctccgtcaactgttttatactcaatgccctgcactgtggatagcgatgattggagcggcttagaatgcccagttcccgagttgaggcagctttaggaaataatcgggatttgtcacgctctgaaaaggaatagtggctcacgacggtttcagggagagaaggaacctgcaattaagtctaggggtctctaagaactagggactggcgacgcctccttttggggttacaataaccaggagatggattcataccactggacagctcctcatcaaatccaccctctttagtcaagaaaatagatttcaactagaatatcgtcggtcttcggctctcctatgcacattatgacggatattgcatccatggatgtctttgctgtatctaatctgttagccattaacgagaatagatgttgtcatacatgcatacatgcaatgtgtgcagggtatgcgtttgtctctgtgtgcagactgagtatttgcctagtttgtctcgtttgtcattttgtaggcttatataccgcctttccataggtgcatcatcacctctcttcttcttcacgattttccctccatctctcttgtctcgtagcctcaacaatagatcaattccaagattgagtctgtgacagatctttcacttatgtttatcattccaatatagtggacgtgcttctaaggcccgccacttctggtcggaaactttcaatggccgcacctacccgacctcacaattttatggacaaccttccaaattgggccagtataaatgtgatgactaatatactttgctgcctcgggacctcgggatggctccggggaaaggtaagcccgtccgtatttcttgcctggtaaaattggcatgagctagcacactgggtccacttttcttccggcatatatctaccgccttcgaaaccgcctgccattccaatcaagctatgatccagctctctcgaatgtaatcatatccgacctcatacctagttgctcaattactcactgccaagtaccttgatatacttacacccccaatgtttgcagcaagagcatttggccgacaggcccgggttcttcccaaatggacccaattccgttgtgtatcgacattggaagggtctccgtacatagtatgctattgcgccaccttacagagccatcattgaagctaaattcttgatagtacgtgttcccaaatgaacaaccaagtggaacccacgtgttgtcactattgccctccgagcctgtcaacccagacctggctatcggactcgcaactcaactgccaccgacaacagacaccttcaaagaaaacccaaaattcctgaatatagtacaagatgtgctctcggaatacgcacatgaagaccccgatgccaagtctcaagcgcaggtcatggtgtctgtggccggggcgaacctgaactcaggcggtgtgttgttaacgggccgacgcggaaaacgtcgtggagacgactcgagcagtggtgctagcggtcagggtggtgcgggctctggtggacgtggtggctggattcatatctccgatggcagacggccgcctgactatgggcggatttcttggtaggggcttgcctgtgtttcaagaagcacgttttactccgtgagatttatactgatgccagacaggcccgaggatatgttcggaagtcttgaagtggatgccaacggtcagttcgttggagacaatggcaattatcagccaagtggtatgttttccgactatataagactcaacaggccaagctaatacttagcaggtacatatcgtatcctaacccgagatggaatgtaagtatccccttcctagatttggtcatactaggatcaatgttgatcgattctatagtttcgggttgagtcctttcctcagagagaagctggtccggaagctacgagagcttgagaagtgatctcttcgaaattagtgtacattgtcacagaatcctatgtagaatatatatccttcctcaacagtgaactcagtgctctactctttctttcaaccctgcattcggttgctgttgaactttttgcccagctttctttaaccacagtccttttgcattggactgttaccgactcaacgcattttccaagtcaattgagttttctattctatgaagctgggtttgaacgacacattggatatggatgtcacctagtaaatccagcttggtcgtgacgttctcatccctgcttgacaaaaagaaaaatatatatcggtcgaaagtaaaaagatccatttgactattacatgtatcatttgttgaagaaactcgtaattcgttgtgatccatctgctgccttggttcctccagacttcttcatagggctattataggtagcactgcgcaacttcttcttttgcggcgatggctccgttggatccgtactgacatttcgcttcttactttcctcggcgtcagcaggagcttctggagtatgctccctcttgccagctggcaccggttttggggcattgtcctcggtccattctgaaacctcagtagcgcggtgctcggcttggtccgtcttcactttcggcgacacaggctccttctttggggagggatctaatttttcctgcgttttcgcattggcaaagaagtttgcaatgttgctcttgttttccttgctgtcgacaggaacaatgaagtttggggaattgtttccaactttcccaacctccttgggtacaggatagcactccagttcgccctcatagggcttgagaatcgattgaagctcttttgaccaggtcttttggcgggggtccagccatttattcatcgcttcactcccgggttctagtatcacgggcatacgttcatgcaggaacttcaggtagggattagaagaggttgtgatcaccgtgtacgtgtagagcttttcgtcagaacctgtgcaaattatttcgtcagcccgattagtcttagtccttatatcagaaaggcctgcacatgccctcataggaaacacagtcccatagtccagcaaagcacatcagctccccatctttgcgccggataaaatgtggaaccttttccttgcccccgggcccctttttcaaccactcgtaaaagccctggcagacgacaacacacctctttcgtcgcttcatggtagtccacatccccgactctttggccaaggaatcatcgcgacagttaatcgtgcgcatcatggatccgtaatccggctggcgcttcgtccagaatgggatgaggccccatttcatgctctggagtttgtatttgatagccgcgttgtctactggctcggtatctgggttcacatcatcttttgcttcttccgaatcttgtttttggtgttcgctatcaacatcttgctgagcatcgtagctccctttatcggtgatatcagcgcgatagacggcaccgaagttgcccggtgcaaaattgtatgtctctctgactgcatcatcgtctggtgcttcatccacttgcatgccttgttcttgcaggcggtctcggatgtacgccaagcgcttgagatggtcagctggcgaataggctagatagaggaaccgtaacataccacgcccaaagcatatcgcccacacattgtcactgtgagctagtatatctactgaatgaagagatctccacgagcaatgcttgatcaaaccagtgtattttccagacagaatgggtgggaaggtcctccagcgggcgacgtcatatggcggagcggagcttggaccaccagaaaatcgagggctctcccatcaaccactcaccatataccctctccgtctctctctctctccattttctaagtcaatttgcgaggttgtatcagacaaccagttgctgataaaaatcaagaactgagatctcattcaaatactccactcacacgttcccaatgttccgcgcagcatcacggcgcacgagcgcgcatgccgcaaaacttctacaaccacaaccaaagagtctcgcccgctcaatatacatcaacagcaccacccggccaaccctccaatcccgcttcaacaatggcaaaccacttacaagcccctacatatccggtacacggcacctcacgatcatgcagaaaatcagccgcaaataccgcgaagcatctaaaggaatctggcgcaagaaccccatcctcatgccactagcaatcatctcagttgttggtggtgccttcatcttcgcctacatctcctatgtggaagtgacacgggtcgggccacagtaccacaaattcccgccgccggtggccgacgctctccgcacggctgtctattacaccgaaatcgatctcaacccggccaaggctatgaaggcgtacagagaggctctgcatatagcattcgagatgggcatacacccatactcggacgagattcttgggatcaagctgcaggttgctatgatgctggagaaagctggacttgtgaagccggcgattgatgtgttggagcgaacgaagaacgagactctggcgtgggtggaggaagtcacagtaggtaacgctgctgctgcggccgataaagtgaaggaagcgcagacgcaggtgcagaagaccccggccaatgtcaaggtcgacaccgaggcgattcaggaaaccgaagaagatctgaaagcaatggcgcagtacgaggctcgtcagcgagatagagcgctcaagaaggtcgttggaattgcgatgaagcttggcgagctttactccagcgattatatacaggacgagaagaaagccgaggctgcgcaggtcgctgctgtggagatctgtctgaaggaaatgcaccgtcgtcagaggctgggacttcctgttggcagctctagcagtggcgaggggtcagacggcgaggcatggctgaatctcactgaaatcgcgacggcgttggctgagcttgctgctacttataccgccaaggagcggtatgagcttgccatgcctctatatatgcgcgcattggatttgatccgcgctgccgagggaacttccatatcttgcaaacaggtggtgctgctgaacgatgtcgctaccgctctggttggccaggttcaactaccccctaagtcccagccacagcagcctgttacagcggagcagactgttgaggctgcgcagaaatgggcggagaaggccattgaagttgcggcgcacattcaacccccgatacgggacgaggagtgtgacattacctgcgtggttgcgacgtataacctgggcgagttggctgagcttcaaaagaaaccagaggttgctaagaagcggtacaccgaggctaaggcgttggccgatggaattggatatgaggaggggagtatgatggccaacgaggccttgaagagacttggaaagaaataatgggtagaaccgtgaaggcgtctctgttcagcctgatgtactatagaaatctcaaaccatttttgtatgatttgactctcctcgtcatacataccatacttaggtacaatgtatgcagcattaccctactctgtacatagatagcacaagtgggagcacaaacgagaggaaagacgtacaacctaacggacatacggtacgatggttttacaaggtatctttagaagaaaaataggaaacattttgatgccttaactggtattagaacatcacatgtcttgtacaagattccatacattttccatgcggatcaagtaggctagacatgtcagaaaacctccaggccggggacacctcagtcccggcgagaagtgcttcattgctcgtggctcatacatcccaaaccaatgctcttctggccatatcttttgaactttttttcaattcccttgtcaatagatcaaaaagaggctcctcaagctccgatacaaccactcaaatctatgcgcgcgacataacaccccaggcgcggatcttgttgtcggtgtaaccggcgaacagggtctggccgtcagcggaccaggccaagctgatgcactcggggtcacggctcttcttgcccttctcaacgaactcaggcttgagctcatcaaccttgctcttcttctcgaggtcgaagatggtgatggagctgctggtggcagcgcacagccagtagcggttgggggagaagacgagagcgtggatctcatcgccagcggagagagagtagaggtgcttggactcgttaaggtcccagagcatggtggtaccgtccttgccaccggaggcgcagagggatccgtcgggggagatggtgacggtgttgatgtatccggtgtgaccgatgtggtcggtctggagacggcaggaagcgagctcccaaacctagacgcggatcaaatgttagcgtcgataccctcataaagaatgtcaagtgtcaaggaaaattttttccaatccttctctcattcaataaaaccaaaagaaatcgttgctgtgcccatcaggcattgggtgaaaattgtctcatggccccgaagggctctgaagtagcaaatacgtttatgcaaacatcacgcgggcaaagcaaggcggggaggagattctgcagggaaattcggagtcgatagcgtaccttgacgagcttgtcccagccagcggagacaatgacggggttctgggggttggggctgaagcgaacgcaggaaacccactcagtgtggcccttgtcggtgatggtgaacttgcagtcaccgagggtgttccacagcttgatggagcggtcacgggaaccggagacgatctgacggttgtcggcggagaacgagacggacagaacatcgttggtgtggccgacgaaagtgcgggtggtgttaccggtggagagctcccagaggcggagagacttatcccacgaggcggacagagcgtaggcaccgtcggaggagatcacctataacgcagacaagaccatcggtcagccaaaaccattcccatctttttattttcattttcgaaatgcgccatccaaatccatctgtcgcatccaatggtttcgtggttcattcgggagaaggaaaacgtacacagtcagagacgatgtgcgagtgaccctcgaggctgcgcttggggtaaccgtaggcctgctcatcacgggtaaggttccagatgatcagggtcttgtcgcgggaagcggacagcagcatgttggggctattatcaaacattccagtcagaattttgtcccttcaaaaattcaatccccgatcgggataggtcgttcttacttctccagggaggtggcgagggaagtaacccagccattgtggccctcaagggtgccgcgaagaaccagctgctcagccattatgggaatgagacaatgaaggagagagagggatgggcggagattgtcgttgactctagggggggaggtaaaatcgagatgggaggcagacgtgcccgctcaagccctaagccgcttcgctgctctccttgtgtggttccgtggagccctaatactaagcgaagtggtcacatgacttgcatctatacagaccagatcagggcctcgacgacgtatttggaagatagagaattgaatgtccatttgcattcagattttctctgtcatattcgaaactagtactgactttggtcgtctcccccaatctgtgaattccacacccattgatcccagtacaatcaaatatacaacattcttaatacatgccttctatggacaatatgaccactatgacaactatagtacagttttgaaatcgaccaacccgagttcaatcccttccacatgccccttacgaattaaaaacctggacatcaggcattcttcccaagccaccaccaccaccagtcttcttattcttggccttctcaaagccagtagcactcttatcgcgaacatgctctctgagcagcgcgaggacctcagagttctgccagcgcgacggtacaggccggtaagctgccctgaaagcgccaatggtctgcgcccattcaccgctcttggcaccgctctccttccaagtttcggtgatggtatcctccttaggagtggagggtgagatctcctctggtgagtcctgtgtcgcccagtagtagatgtcccaatcgttttcgtcgaggaagctgtcgtactcgacgagctgatcgtagttcatcttgcccaggtagacatctgcgaaggtcgagagcagtaggtccgattccaaaattccgcgtttgcggctttggtctgcggtggaattgattagcttgaatggttctgggcatatttatgcgtcaattcctcggccttggcattgtgaccgaggtgcaagcatgcatgggaatgggtacgaacatagcaggcgtgccctcttcgtggctagctcctccccaactctcttcaaaggctcaaccttaaacgtaataccctccatctcaccaacgccaagctcgggcttctgcgccccgttatcctggcgaccaccggtgaaatgctcaatccttccggggtacggatcggacggtctgtagttgggattggctgaattcagcatctccggcggcgcgggcttctggccgacattgacgaagtcctttgtcatggtagaggttgtgttgggcacgaattggttcggggccttgttggcctggtttgcgcggtgcgcctttacctccggggaagcttcgtcgctgccatctttgaggcgtagagctgttgttccgaattggcggtttagtcttgtgattgtgcttatggatgatggcactggtcgcgcgacgcgatggagtatacgtggagcagacatcttgctgtacagtatcctatagggagtcgggactttgctttttctctctagggatgaggagtttggcgtttgatgctcggctttgacatcatccggtgtaatagcccggggaaccgaaaagctcctgcaatgcccggtgtttgttctgtttgcaatgctaagcatcccactgagaggccgtggattacacacttgtcgacacagcgcaattctttagattctatgtgtttattggggccatttaggccttcgagttcgcactcttttcgttcgctgctttggcctgcctgttgttttggtttcaccggaatccctctgcaagatttcgatctagatgtatacactgacctcatgcagaaatacaaagctctccagggctacctaccaaggtacctactacgtaggcagtgctatgccagcataggtagatactaaataatctaggaacactcgggtaatacttcactgggcaaaaaggagcacagtgaagtccagctaaccaaccatcccgaaggtatcacatgcgagaaacagaaatattattagcgccaggctgcagaaagcatggtgtacattttatatcattgagatcatgactgttgaacagaatgccactcgacattagagcaaaaggatttgcaatgcaaccgctgcaaaaccaaaaaaagaaccatcaaagatgcaaccattccatggactagtaaatctaaataaggtgcttagatctgcaagaaccaaatagtcagtaaccatttccaccttcaaccacaaccacaattcgacgtacctgaagtaagccctcaggtaaacaacctgccaagcaccaagcccgataagcatacccatggtgccaaaagcgaaccacttcacgcgctcattggtgctctcattggtatcacgcaaacgctgctcacgcgcacgcaggtactccatctcggtcacgatatcggcaaccatctcctcaatgcggcggaggtctgtctcaacgggcttgagcttctcctgcgattggatgctgttccagtcgcgagcgtcggcgccaatgtcgacgtcaagttcgatggggcgggaggggttctggatggtgtctgatggggtggtgttgttttagtatcacgttatctttaactccggcattttcctcggcgaattgtgtgttattcgaggactaccacttactgtggccgacaagctggttttcaaagcagacgtcgaaagccgtgtccgcgggcgaagtgaaaagttgacgtgtctcgccgacgacgtccttagggcgaccgtagtcattgcccatagcgtccttgatctatatagacaaaaagaagaattagtcgcggtccacaattcaataattcggctttggctcccaagtcccagcagaccaagggcgaaatcccatccacatccagaaatagttccacgtacatgaatgttgaccttctggccatcacccttcgagccaccaacgatggcagtgacaacgacgagctggtccttggagacgaagttgcggatgcatcgctcgttcttgccgccgccggaggtggcgacgaggtcgaattttagggcactggcgagctgagcgaagacaaatagaaagccaaggatggtcctcagcgtgattggtgaggtgcccattgttgcagcgtggaattggcggttgtaaacacggatgcttgctgttgatgacacctggtaaggggagtgcgggattaactttcttccggtgccacagtctgcgatctatactttgagggattcttctttcacgcagcaaatattgttgggtctaattgttttgtatttacgcaagtcgggttattactacgtgttggacttatggagttcacagaagaatgaaatggtttctgagtctcagggcattgaaaaatagcccaagtatagaatagacatggtatctcgaaatccacgaaagcaatcaaagcgacgtcccagcaaagagacaaaatagaaaacccgaagtcagtattaatcgtttagtcgcacgcagaaaggtataaaataatgtggcgcacaaaagcgcaagaaaagataggaaaaagccacccggccgtagggatagtaaacaataaggaaaagaggacgtgactctatgtgaataaagtgaaaagaaagggaatgatagcgatggcagtgctgttgcacaaacaagaaaggccgaagcgatggacatgatatgtagatcgttagatgaattagaacgctcagcaaagcaagacattagtcgagaatgtcgtcaggatacttcaaaccgttaggcctcgaccttctttcggcgcgcaaagaaacgggaaaagccaccgtccttcgccttagagcccattggtgaagatcgattgggggccggagtaggcccggtgtttcggaggaaatccgccaaatcaccggtgtcggtctggcggtttgagatggaaggcatggtgccagtgttgcgctcctggcccaccttggcagagtaattggattggaccttggtgggggcgttttgtgtgcgcaaggagttttgagaggtgcgaagcagacgtgccttcatgcccgatgcgccggagagaccatttgatgcaggagcactgattgcaaatggctgtggggtttgttcagaggatgggggaggaggagcgttgcgcaggaaatccatcaggctctcttcttcgcgcttaggcttgggattttgttctttttccagaagctcttctagaagggcgtcatcgtcgtcgtcgtcaatggcgtaaggatctggggcacggcgttgcttccgaacaggctggggctcgtcgaagtctgtggcgcttcccgaggctgtagccttggttcggtttgaatccagcaagccggaccgcgaaccaagagatgtcaaggacttattgggcgtagatccattaacagtgctcacgaaagagttggacgtagtgttatccagatgaagatcatccgagtcaatggtgttgcggaaaggtgcgactgtccgagggattcggtgcgcacctgcaggcataggaggtccctcacgaatgaagtcgatgagatccgaagtctgagatcctcccgtctcggcagatcgagcttgaagcttaggtcggtttccacgggaggcagtggagagagttgagggaggacgaataggacgcgtgctctcggcagaaatagaggtcttagactcgtttggcccactagcagggccagtcgatctcatgaattccgcgaagtcgcgtgtcgactctgagggtgagattcgcgcgtcccgcgcctgtccaaccttgctagacctcgatgttgatgacatgttggtcaagcgcgtagtaagcgggatgtgcttaggtgactcaatggatctggtgtgcgagattggagtcatctccccagttgcctttgaggaaactgaggcttgagggcggtgtttttcttcgtccggtggcgcggtggtatttaagaattcagccaggtcggagacacctgcggtctctgatcgaggaactgatcggctaggcatgtcaggtaaggtcatctccctgacacttcgcggagtaagggtgtaatggatagtctcatcactgttgatcaacttatccaaatcggcaatatcatcgtctacagagtctacgctcccagatgcgcgactggtttcagacgaactgcgcatgcggggcgaaccagattcacctagtggtcgacccatgagacccttcagtttgctagaaacgtgcgatgtggtagagccagcagttactggacgcgtattctcgcgtgcactgccgaagctcccagaccgacgggttttagtgatgatagatgaagccgtcgacgtcgacggtcgagacatgcgctgaacagcggctcgttcgaccgcggacgcggaggcggaggcgggggagcctcggttgctggctgtgacctccaaaggagcaggtctggggcgagttttcgatcgctgcgaattacctgaactagaagtcgggcgagtgatatcgacggggagggattttgaagattttgccgtttcggtgtgtgcctctgatggctgagccggaggggtcgcggtcgtggccatgttattcagatcatcggtcgcatcgtgatcgatagaagatgtgacagcctcgatggggggtgcgggtggagccggcgtggtctcaaccccttgcgttaaaggctgattttccgcaacggcttgcattccagaatcgctagtctgttcagagatcgaccttgcattcagtaggctgacatccctggagggttgtcgttttggtcgttgtaccgtcgaagtcaatttaggtttttcgcataatccagtgccctcaatcacttctgggtctttctgattcggccgatcgcccaatgatacaatagagacgcgagcactattggattgatcggtcatagcgtcttcatcttgtgcgatagctcgcaaggatgcaaccgtctcgctgacaggaggcgtgtcctcttcttcttcatgcaagatcgacattctcgcattttcggaagcttctgcaggtgtcttttcgtgttctgtcgtgacagcaatgccaggtgtagtagtttcggctgcatccacatattctgctgattcatcgtcctcgtacatagtctctagttgctttttctccgatgcggtgggcgatgggtggtctgttggcgactctggctcctcctcagcggagttgagtgtggccgcctcattaggtagagacctcgtacgaacatgacggaatgatttgcccggttcaatagctgacgcactcacgggcgagctgtttactgaacctggagattttggcacaagggagggtgacgaaaacaccatcagactacgtggtcgcaccttgtgagcgataacagcctgcatggtttgcacctccccatctagatcgccaatgtagcccgggacctcgatctcttgaacgtcgtaatcactcattggcaaggggacagtggcagggtcgaaaggcggagaattcgccacggggagaggctccttgggagtcactggttcctcaatcgtcacaatgctgctctttcggctgtttgccagggagtatccacgtgggcggaacgattcacgagatagtgttcgagaaagagtggttccgcgtctgcgctgcctccacgttcgccacaggcgacccaaggttgcattcagggccaacttctccatatcgagatcctccaccacaagtcggtcgattctttttcgttctccagatccattcaactcatcgccgccattattgagctgtgcggacaaacgagaccgcgatgtctcgccggcaatgacgagtgcgcgctcgccaatgtattcgatgatcgaggtaaggaaaatagatgctgccggtgtaatattgtcgacatggctggtaaatctgcggggtgctccatcggtttctccaagtctatcttgtgcgataaactcgtcttcgtcatcctcttccatatcgcccagtcgtgtgtagaccatgcagcgtagacgggttaacttccatgagcgtactagatcaaaatcgccgccgggttcctggccaccgcggaattctgtctgctcatcgtccgctccacccatatattcgctcaactcttcttcagctgaggccacgacttccttggccaggcggggctttagcacctcggccatggcgggtcgaatgcatgcgagctgagtcgacttggacgaagcgaggatgttaaacaagaggttatcgaggaatccgttcaggagcgatagcgcggccggggtcaccagcgctgtggcgccggcgccggtttcctcgtcctcagcgacaaaatcggcggcgttgaactcctggtcggcagagatgatctccgaagctgcggatggcgagatgaacgctggggacggggtcacggacggtggtgacatgaggttgactcgagaaaactgcgaatcggtagaaacgacgctggggctgcgcgaacgagacgcggccccggtatccaggaagtcgggtactttgatggattgcattgtgtagcccaggtatatttaggtcgagggctcgaggactcgagggctttagtctgcctcttttctgtgttccttcgcagacctcgagttggacgggatggcgctgggtagaaatcgaaatttctaaatcatcctgtactcccaggaatgtcagtctgacacgattctgcgggtgaaatctgacttgaatgaaatttgggggcttgtacgactgcatgcgcaactcgacgggcccccgtgacaatggaaagggtgggtttccaacttacccgtttgaatcagatatgcgatcagtgctcataccgcattggcgcaggggaagtaaaagagaagcaaaagaatgaaaggtaatcacccgtagaggccaggagagagagagagagagagagaatcaggagtaattattccatccgagtcagtggggacttgggagcattcggggtcgactaccgaataatttatggagcagctgcaattgtatacaaatcttacaatcttacctgattacacttttctttttggggttgcattgtaaagacccctgtaccttatttaggctattcctcttattttaaacgctatacggagtaacctattcacatacattgattgtaggcagttattgtactgtgtactccgtatacccttattgaattattcaaagacggtcttcccccttattcggagaaaggaaaaaaaggaaaccccatcgcaatcgcgccccacgggaaaaaaaacagaacaatgttccagcgatcggcacgctaaagtgccccgctcgcacctcgtttcaggcctcattggttgtgggcagccaatcattgaatgtggttccatggattcgggcggcgggggtctcagttagcctttagcgccattcctttcttgtacaattattgatttttgcctcgactcattcctagaaagaagtttgccccagatgcacgcagggtatatgtatacaattttaagtgcctcgggaagtatttgtaattatgatatctgatatctgaatatctcatttaagtatgacccgctaatactacggggcacattcggtagtgcagctgttagcgcataacatccttttccacacgttcctcagccgttccacaggtcccaggggcacacgaggataagcctgtggcgcagaaatgccatgctacgggtagccggtccccattttccagtttctggaaactttatgtatacatattgcaccatttcgaaccttggaacactataacatctgagacaaatatctcaaattatatcaatttccccaatcagctttcgcttaggtggccaggtggccccctatgtgacgcgcacccgtaccttcctccagggctgatctgaaccacttattgaccaactctggatcctccaatcaatccccttgtcagattctcacccgtggaagagcacccattcatttctgggagagcctcctacctaagcgaatgagaggctgagaacccaatctcattttatatgacatgctgtagctgaaaatgtgagaatacgaagtacagaatgtacggagtaatccgatcctcccgtgtccacctgagcattcaacgtcggagatgacaggacttcgggtatagtgggcccatgtggcaatgaacaacaatagggttatggcgactattgccaggtaccccaacgtagcgcgcactagcagtaactaacgatcacaatggatattgtcataacaagacatgaatcatgcaagaatgtcaagttcgctatagagttccggaaaaagcaattgcatacatgtacaacgcaccacttgttctcgcaccttgcagggccgctatatagatctagtgggatacatcagatcctaccttcatgcatattccctgatctatacggggtcccctcagccctagaagcagcttactatgtgcagtatcagcatcccaggacctcgtccaggtaccagcttcagcccatctcacaggagttacccgtatcgcacaacgagacaccacacgttatattccgtatccagcgttgaaatatcgtcattctcattgattgctcaaaccccctaagcaacgggggagtctgcatttccatccccgacaaaaccccatctcaccatagcacgcacggctatgactacaattcgtaatcgccatcgggaaaaagacttggttcccctagcgacccctggccctacaacaagcgtatgtactccgtatcctccatgtccttgaactccattgttggagctaacatacttcatgcggaaagaaagactccactctagcctctagctgtcaggcccttcataacaacccttcccgggtccacagtctagcttgtacggggactccaaaagctaaggatcctgccgcgagcgatcgacagactgattattctgtttgatggattagccgaatatctccgcggtttcttcatcattgtatttctccgtgggacgcctcacgcttacgactcatacaacgtacctaggtgatatattatagtacacggagtaaattgtatgcacttctctacatgtgcaatctcattggctcttcgatcaccgacccgcacgctatacagccgaatattttccaaattaggaaagtcgcgatcgtcaatgatcgacagcgagtaccagggacgaggaaaatgacagagaaaagaggaatcaaaaacctgcttcggcccggttcatgttcaccgcatcgtttttgaaagtctaaacgaagccccctaatccgtattctctgctttagtgtacgttttcccttctaaggttctccccgggctgtccgtgctctgcaccgttgtgatcgacagatttaattaaaaacggtgattcgacacttcgactctggatatgcacgaatctttattatatgatacgttacgccgttgtggtcgataagaaattgaattggaaacggcgagtcgatacttcaactttggatatgcacgagtcatgtttatatgacatgtcactccgaaacggtcacattttctccgaaggcacaggtgcatggtgaatagatccaagtctacggagcacacgcattcgcatctctttgcttctgttagatttactgtggtcgtatgccaaaccccgaaatcccggggtgatcttcactgcaggaaaatatacatgtacgatatacccgtcatacattaactccctacagcatactacaacatatgtgctccgtactccgtacacgcatggagcttgtaacttgtggagcttggcataatccggtccattattccgtgtcactcatcatctaactaccaagctagcacccgtctgcatcttggccccttcgaatatgaaactcccgacaatccccgctgaccttaatggagccaagtggataattacccatttgcatggagtctgcatgaagtcccacatgaagaaatggagcacagaaccaaacaagaaagaaagactcctataggatggctcagtaataattgaccccgttgaactgtacctatcgaccggtatccttagactatgtacggagtgcttcttcacaagacgctacggagtacgcggagtacaaccaccatcactagcactagcactagcccactagccgcacacttgtccaaaaatacatcagcccatccctgccctgcaaggaacaaaagaaattccccgggctggaacgcccactagtgtctgggccctatgcgagcaggcatatgggggatgaaggggcttgctcggtgtatcagacgtgttagaggagtgtcaggagaagtctaaaaggtgaatggcgtacggggtagtatgacccctgtgttggtgcgcatgataattcacacactcagcaataaatgttggaattaggtaccttttgtatgtaaaagccgtacaaaaggtacccagttcccgaatgtgtcaggggtaactggtagttgaaggaaggatttttgaaacgtctgtcggggctggaggttctttccagtcgcttcttttttgcacaagttacactatacggagtttgtatatacctataacagaactgtaaacatctacctacaatataggcgcataataaaatgcaggtgtttcaagtatatatataggcatatatctgtgaagagcgatcctggatgttgagtacctgggactcgggacggttgataggaggctgaaaagtcggtacatgggctgctgcaatactggagggtttacataggtatgcttcgatggtgatctatctcgaaaagtggcctgttctgtactcaccttggctcagactcgggctgtagatgggttcctgggcaggacggggcgaaatagactgattggtcgggcatcatacgagatgaccatggcaggaaatacaggctaaactacattaaaccgtcaaccttggaacatctgaagttttgaaactgtttttgatatcaagcgctagttcgggaaaatacatgaccactgtcaaatcctagtccgaaggcagcttgtaaaaaaatttgaatgcttttcctggctaactaaagagccgttccattgtgaacccttcgccatagtcagcgaatccgaaagaaaacgttttctcataatcgtaagttcgtggcatttgtttgcctatgtgcaagcagatcttagacctgcacaggcaaggttttggttccgagttcttgcgcaatgccgccagcgaagaaactcagctcatcagggccgatgtcgacccgaccactcgccaatctgtccagcaggaattgctcaatcttgtttaagagagcttggtggtgagccaagtctaagaccgacgagtctgtaccgtttggattgcccgtctgctcttctgcgcggagtctgatcaactcgttgagctcgtcctcggcgaggaggttgcagaaggtaccagtgacatgattggagactaggtcgaggtacaatgaaggcgcaccctctgggtccacgaattcggtgtccttgcctaagcgaatgtggtcgacctgaactcgaaggtatgtctcgtacttcggggtggcaatcccatgaattccattcatgtaagcgacaaagagactgcagtccaagtccacggcatcacgcgaaaactcttctggttggttggtaggtctgcgaataaactctggatggcgatcttcattttcgtcggactcagcaatgtccattttgtcgagttgatccagaagtgtttgagtgcctttggagtcccgagcaagcatcatcatttcatggcaggtcatttgctgatcaagaccttcatcatccgatacttccacgctgtcaatgtacttcacctgcgggtcaaagcgcacagagttctcctcaaaggagatgaaagcatcgtcaaatgactctgtgtgatcctcatgcgtctcagggacgtcgccatgtgtttcatcccagactgagaagtccgaatcatcaccatcatcctcttcgtcagattcatcggagagtgcatcatactcagaatcaattccatccgagctatagccggattccgaatcggactcttcgtcggtgtcaaaggtaatggtcgagtttttgaggattgatttcaagaaaggacgcaaagtcggtttggtagtagaggtcgatgcatctgactgagctggattgcaaccgttcgatgtgactgaaacttcatccgatccatagcagctatcgtgggagaaagacatctcgaggttggagaaggtagaggagacagagccccaagagcctcgatggagggttgaggtactcatttgttcagtgattggtttgtccatgctttcagcgggacagttcatggacggtttcgttgatttgccgaactgcctaaaatatcgagacttaagagggctctgggatcgtaaccgagcgctcctaggcaggagagtgttgtggaagaacgaagttggaaaaggtgcgatcagtgagtcgaaagtgaattaagagaatagcaagggcatcgaaagcctgcaaagcacggtgaaaagtgcatagtgaaggcacacgggaatcgtgtaaaagtctaaggaaacttgtccccagcacaaatgatggaagacatgattttccgatagacgctttatgattagatgtagaagggtactttcttgccagtctggtgtgcggaacaaaacagtcgagactggtcgttgtggtggttcgaaatgagcttgtatcggtcacggataacacagatgccaaaggttttgtcgatatgcatgtagggtacaagaaggtggcaaggagaagtcgtggtgttcgcgtgacgcaatgaaagcggcgttggaatgtcgcgagagcagcaagggtcgcaacaaaggtcgctttaagaaaatcaggaaaaaaggcgtatcgcagacgaaggcttcgacaagaggagacgatcggatacgaaagtaggaaagagaagagtggcccacgtttcgcggggtgtgacggaggggcaaaatccgggttgagtcacgtcgactttggagtgaaggcgacgatatacaacgcagatgaggaaagtgcgagagcacaaactgggtgactgccgataagcagtaacagtagtagagagttgagagtccaaaggtcacagtgtgaagtggcctgaaggaaaggaagagaaagagaagaggagggtcccttaccttttgggaggtcggaagggtcgccccaatttctcgtcatctgactcagccggaacttgacctttttgggattttgccctttgtctttcaagatctctttgttacaaagtcatctgatttctagatcattccaacaatgcatttgatcatttgtctattgttatgaatacctaattattacgctagagtgccgagtgcgcaatatcagccttggagagaataacctcgggagcgtcggagtacggagtacagagtacagagcacctctcagccgggaattgcttttttagtgtcacacccagggttttgatcacaatcttccttctaggcatatgatattaatgcatgtctcctaggtgtgtctatgacttattctcaagatcttgctgattgcatacactttgcaaatatccatatatccattgttgaacaggccatccgctattgctgcaccactaacatatcaccgaagtgtattgtttctgactcttccaatgcccctttccgtttttgtctcgctttataaatcttgtttggaccggcctctggctgcattgcgcgttagcgccttatactctgtttgaagaaataggcacaactgcatgacaggttgcaggcctatcgagatggtccaaagcgccttgcaacttcagctctaccaaattctgggttcgacccgagttttttgtgaagtctcgcccgccatctatgttcattggttgggtattggctgcgctgtgtttgtgatgcctgagctcaacccagacataacaaggatgccaaaggaagcaagacatatcgacacaccccgtggaccaccaacccattacaactcattggtggattcaaaaattacctaaacacaattggctaaccttcgaatgatatcattttgagatacaagaaagccattgaaggacactacgctttgacaaatggcacttgaatttcttcaaggggaaaggaggcgtcagatccttatctcatgctgaagaaaaggcttggtctttactgcattcaaacacggccttatcttgatcaactttgtgcagtccaaatatagaacatggggtcgaagcaaacactcccgaataagggccctggacggcgatctcctgcaggtcaaggttttctaaatttccgagcaagctgcgcatacatgctgtcttcccaggaaaatctgtccttctcgaatatctcaaaattcttctgtgcattgtccggggggaaaagggggtgacattccgcccagcctctacgttccaacccacattccggaccctctatcaccaatagggcattgaccaattgacaacaccacccccaccaattgaatcgattggctaatcatgatgaagcaaatgaaagaagtgtctagccagattgcgcggcagatcatactgtcacccaagtcgaatcttcgggtggttgatgatgggatagcaggtatcatgacgcttacactgcaaccttgaaagtatcaaccttggaacctgataggcgatcatccttttgccccagctgtttggctagtccttgttccttggacaatcctgaacggctcggcgagcgttccgacccatttcctttcctaagtgctcttactccgtacaagttatgtcgatctctaattcaaggtagcgggtcaacatgcctaaggcctccccagacccgcttcaccagctcatttgatgactgttccactgcttctggcttagttaaggagggttacattcctgtgggtggctatccggaacaaaccctcttcggggtttggcaaagatcaatagctcggccagccattcatatttgcgcaactacgattggcttggagagcttgaatcattcttctgggaggttggtggggccggctagaagccaacggggccctctacagcacattccttgtccatctttagagcacttggaatgtgtccagaaattccgaggctggtgtccctgacagccattcaaatagggcttgcatctgtttgtttgctttgctttctttgcatcatctgcagtgttttctttgattgacaaacggtcaaacatccaaacaattcaaaccaaacacattctctttgcatcatttgcacttctcggatatccgggtcgatcccccgaatcctaaaaccccccagagccctaaagagcatctcattggttgtccaatcacatctagtctttgagacatctagtcgctgactacacttttcgccccgtacttctatattgtcgccgcaaacggaaaacaagatgttcgcccaaccatacgaccattcgttcaatgacttgttcaaccaatacgtcaacatggaaactagtgccgttgatggaaaagattcggcgttgtccgattttgaccagctttttccacttgactcgctgtcgagtgactgtggcgatcttccacccactgtctccactcccaaacgccatcaatcaccgcaaccctggagtaatgagtggtccctgcaggatgacggggccgctgccgatcattttgcttttcatgacactgtccacccctctgcaatctcagatgtcaatctgaacaacttcgaagttccttcacgccctaccgcgagccacggtctatctacctcgccatccacacctccagctacccctagacggaagcctacccagagtgctcttatcacccctaaatctatccgccaccgcagcccgaatgagcgtcgctctcatctgcgcaagcaaagtttctcccccagcttaatgcgctcttccaacctctctaaagcaagaatggcatatcccgaggcttgggcccagcgacttcagaacttcagtcttcacggttccgaagatcgtctgccgctgtcacctcctccatcggatgtcctcattcagcatgagaacatgcctaccgaacaaatcatgaaccagcatggagactcagcagagaggccttcccagtacgacgcaagactataccaacagtctccttcagtttcaatgccatcgccgagtatcgcaatgtcagcacggcagcaacagcactacattgctcagccaagctcttcctccttgaccaactccagcccttcttccgcagatgatatattctcttcgtctcactcatccgacccccattctctctcctcttggcaatccgaccctcttcatgcctcatctctctctttcactccagacctccaaggccaagattctcaatggtggtctcccatgccttcccgggtcgctcaacaacaggccgcttacctcacatctcctacacctgtacgcaccatgcaaagcgttggaagccaaaatgacatgatgcaaggaggactaatgatccaattcaacccctcctatgacatgtcggcggaccactcattctcatcatctaatatgctcccggccacccctcaaaaattcgacacctccttcaacacctcccaagtccacaacgtctctcgttcaccatctctatcccccaaggccggcacatcacccagggacacccgcaatggatccatttccaagcccactcatcgccgcactcacagccgtaagctctccggccagagcatgaatgcccccaagcccgccaaggcatctggctcctcgtcccgaggctcaaacaagtctgtcagcgtatcgttcgtcaactttaccgctcacgacagcaagaagatcctgaccggagttgccccctccggcagttccaagaccaaggctcgccgcgagcaagaagcccgcgatagacgtcgcaagctgagcgaagctgcattgagggctgtgcgcagcgctggcggcgacgtcgaagctctcgaagctgttctctgttaagcttgtttttgatttggtttctttttctgcttttctgtcctacgttttatccagccggtgttttatggttatatcattgggaatatctggtttgcttttggagtttatggttttgctttcaagcctgggcccgggtgattgcaccctcaaaatgttagactattctaatatctagactcttctgtggatatctaattcataatacttttgtgactatccggcctttgctgtagatacttattttccctttttctttttcgcgcttaggggatttgaggcacgggtgttcttttaccaaactggtgagcttcatcgtttcctttttatcctgctactatcattactactgtgactttcggctaacttaaatctttatcctgagtctcccaaattgagtcccctatactgaaagtcctcctactaaatcctccatactgagtcctgcatactgagtcctccatactaaatcctccatactaagtcctccatacagattcctctatactgagtcctctatactgagtcctccatactgagtcctccatactgagtcctccatactgagtcctccatactgagtcctccatactgagtcctccatactgagtcctccatactgagtcctccatactgagtcctccatactgagtcctccatactgagtcctccataccaagtcctacgtatctatgaccttgaaacttaccaacgcgcgtttcatgctccggaggtgccgactataaataccagcccgagcaatttcttcttcttctttcttccttctctccccacgatacatacagactgctttggtgagtatacactctgcttccttacacaccgaggccccttatgcccttctattgcatgcgagtacctctggagtgaaccactcctctctctctgcatatctcactctcattgcatacatatgttgctatgtacgcatctgcattggcctcaccttcatcttcaccaatctttcacttatctttcacttatctttcatttgctctcacttgcatatcacttattgctttaaccacatatcacttcttactcctggattgctacatatcttttaccccaagccctaacctgcaacacacccttctttcacttgccatctcactaagatcaggtattttgcttgcatctcagccttcatttgctgcccttggctcattctgttattcttatttgctgctacacatttgctatttcctggtctctcttgatttccatttctcttccttcaaaccctttcccttgcaccatcctccatctctgcgcacatccctccctgaatgagatattttatcactgcgttctatcctgcatctttattgcatcgccatctccactggcattgccattggcatcactcttggctgtgggttgggttacttgccttattgcattgcgtgccctacattgcccatttccctgctccatcggtccgtcttcacatcactatcttcatgcatctcggcaatccaatgttcattgttattgacgcataatcacagatcaacgaagccaaactcgacttttctttttcctttttgaaaaaagaaccctgcgaaagacaagatagcgcttgtcctgtttcgaaattgttcctctgttcttcctgtcttcgatacctatctggaaataccccaacaactggggatttcgagtccttgtcgtcgcttaccctacttcctcaaatacaagcaaagtttgcagttcgattcatcatttctacctttacgactacctattttctccaacagacattcgccaaaatgtctggtcgtggctacggtgatctgcccattcgaggcggccgtggtggtggtgatcgtggcggctcccgaggccgcggtgatggtggctcaagcagccgtggcagtgaccgcggttacagcggtgatcggggccgtggcagtgaccgtggcagtgaccgtggcggtggtcgtggtggacgtggcgggtctgaacctccctctgggtaagtttatatgttctatatcaggagaaactcatatctaacacgcgtgcagaatgttgacagacccgtttgaagctcccagcgcgcgaatccaggccttggaggacaagttcgttacagagtcagcaaaggctagtccagaatccaactctttggctcggcgtcctggctatggtactcaaggtcgtccaactgtgcttcgtgccaacttcttccccatggagttcaagccgaacatcaagttccattcctatcggctgaagatcaagcccgaggcgaagaaaggacagcaaaagttcattcttgagagcatgttccgccaataccctctcttcaaccaaggaatcggcgttgccactgatggagccactgagattgttacgactgagcgactccccgaggatcgagtgccattccattgttccatgggcgacggaggtgggacatcgaaagcgtacaccggcccttgggaggcgactttgacgtttgaaaacgcttattctccagctgaaatccttgcgtaccttgaggatgtcaatcaccgagaggaagttccgaatgaagcgcccagtctccgagtgctcaacattctcatgagtgcttacgcctacagagatcccggcgtcgtcatcatcggcaaaagccgaaacaaattcttccggatcgacaggggaaaacagtcgatggacattaatggtggcctcgaagcaattcgtggctactactcaagtgtccgtcttggggctggacgaatcttcctcaatttgaacgttagccacggtgcattcttccgtccatgtttgctgacccaaataatcgatgacttcgcagttgtccacggaaaagatacgggtctcctgaaccgggtcctgaagggcttgaaagtgcacgtcctgcatctgaattctcggaagaacggatctggggagaatgaaaaacccgttaaaacaatcctcggagttgccactcttaaggacggatgcaagggccaccaccccccgaaggtttcacatatcgcagctagtgcgaagaacgtggaattctggatgggagatgagaagaagggacaatacgtgacggttgccgaatacttcaagaggcgtatgtttgctacctctctgtcaatatttatggtacagtttgctaataggaaataacagagtacaatatgccactgcggagggaaggacaaatgccggttttgaacgttgggacgcttgaccgtcccgtttaccttcctgcggagctttgcgaagccctccccgggcaaccttgcacggcagagctaggactcatccaacgacagaacatgatcaagttcagctgtcgccgtccccctcagaactatgactccattatgaccgaaggactgaacctcatgggaatctccggaggacataccaaggcggtaggaatcaagcccggcaaggagatgatcactgtacctgcacgaattttgaatccccccaatctgctttatggcggcagaaagaccactaaccctcgaaatggctcgtggaatttggtcaacacaaaatttgcccagtgcgctagcatcagcaaatggaccgttctttgggttcggaagcgcggtatgaagcagccagacactcctattcccaatatagacggattctaccggaaaatgcgtgaccatggcttgacgcttccgccgttcgataaaccgcaccacgaggtcatgctcggcctggatgatagagagaatcgaagtctgctcaaagacaagttcaaagatctcgcgaacaagtcgtatccctttttggttgttgtgcttcctaccacagaaggcaaaaactttgactacgtcaagtatgccggagatcttaagactggcatccttacccactgcattttgtatgacaaggtcctcaggtccaatgagcaatactggagtaataacgccatgaaggtcaatttgaaaatgggaggatgcaatcaactcttacagcctgcgaacgcacgcttcattggtgcagggaagagcaccatggtcgttggcctggatgtcactcacccgtcgagtgcagacccggaggtcttccccagtgttgcttccattgttgcctccattgattatcgtatgggacaatggcccggcgaggttcgagcccagatgcgccgtcaagaacacgttgtacacctcaaggatatgatgcttggccggctgcacttgtggcaaaagaacaacagtggcaacttgccccaaaacattctcgtgtaccgtgacggtgttagcgagggccaatacaacatggtccttatggaggaacttccaaagatccaagctgctgccaaagcggtataccgtggacccatgcccaacatcaccatcgttgtctgtggaaaacgtcacaacgtgcgcttctatcctaccaacgcgaaggaccaagacagaacatccaacccactcaacggatgtgttgttgaccgcggagtaacccgccctatgtactgggacttctacctgcaagcccaggctccgctccagggttccgctcgtccagctcactacattgtcatccacgatgagattttcacaaactccaaggccaatccggaccgcaagcccgttgatgtgttgcaggaagttactcacaacatctgttacatgatgggccgggctactcgctcgatcagttacagcacccctgctttcctggctgacaagttctgtgatcgtggccggaagtatctgttggctatctaccatgacaataaccagcaggtccactcggataaattcgaaggtgataacttgaatatctcgcgccattgctcaaacaacatggtctacatctaatttgaccgttgtcatttctacttttcttgttgacatttgacgatttttgccgatttttgccgatttttgccgatcattccggaatctggagttcgatacccttttactatgctctattgttctttgaaattgttcctgtgccttgatgtttgccatgactttcattgttgagctggaagattgctgaggcgaaagctatgaaaaaccacaaaaagaccaaaaaaatggtgcaatatccttgcttttcttacgagcttgagatgtgcctatgctgcaacaagtgtggaaaaattgaaaaacacaaaaaaaaggggggagatttacttgcttttggtttattgcgatgtctttgcttgtcttggaatgacacttgcgctgcagcatggaaaatacaaaaaaccaaaaaaagggatgtttatatgttagagtacgaaaattgaaaatatcaaaaaaaaaaaaaaaaaactatatgcctgcgtagtcactaggcttactgttagtatagttccaaggaccgagaagatcttaatggtaagattgagtggaaaatgctagatactgaagaagcatacatatgtagtgtactatacaagtgccaatcgatatggctttgagtattttgaaccccccgagacagtttgggccacattgtttatgacctgagaggtcgaacacagtgcacaataacctctagttacccccatgcaacaaggagcgcgggtggagtctttggactcttcgagcatgagacagcctcgataccatctatgaccggggagatgccttttgccgatgaattgaccaatggtgcagggcgacgaccttctctgctttctagcacatatcttgaaagtcaagcttatatagcattgcgaagaaatgaccaaaaaaagccgatatcaccattcaccgcttggaactaggagaccacgcttcaggttgccactcctcgcctgggttggtatttttcgccttcgcccacgggtcctcctcattctgtgtctttggtgctgtttcgggggttgtggctgaagccggcgctttttgtgcaggagcagcgttggcgggctgactcaaagtagcctcatcgatttgggttgctggtggttgttgctgagtcttgggcttatcgaggtaggaggccttgctggcccagcgctcatccgcgagtcgagcgagttgtttgatttgcgcttgccggataagatcctgctgctgctcctggatgctcgggggatgctgtcggacatgtcgcagccattggtgccattgcgctgtgttgaaataagatgttagttgtgcttcaacagtctcattcccctttgaacccggagtagagacatgcgatccaagcccgagcctgcatcttccgacagaactcacgtgtcacttgaacgtcactaaaatgagtcttggggtcgtatcgaacaatgcgacggaatcgagctgcattcatcacatctttgaactcccagtaggtatttccggcgagatcctcacctaagagacggttagcgggactgagacacggagacgccacgggaaaaacagaaagcagatactgaccaaccaagaaggacttccgccagggcaggcgaagcttcttccatttgaaccataagctgttaaccatcgttgagtgtagagaatagagaagaggcaaaaaaagatcggggcgggctatcaggaacgtcatcggggggataaacacagcccggacattccattcctcttctctccatctctcgacctttttccccctttttcctttcttatttctacgactttactagaagacctttacacttctagtaattgaagcattttcctcgtccaatcatttccaattgtatcacggaacatcctccttctgctacccaacacccgccaccgttagggccgatcaggcacccttaaagggatacataccaagtggcaacaacagtctaactacactttaacaatagagcatcgattatccgacactcaatatggcttcagtgacttccttggacaaggacttgcgcaatatgcgcctatcccgctataccccgcaggcagccgcggaggtacgcgactggattgaggaagtgctgcatgagaaactgccatctccagacttgcttgaaggcctgaaagatggcgttgctctttgcaagtaagtagtgtttatgtctttttaaagtagcatcaatgagtctggacccctagctaactcctttaattacaaggctggtaaacctcgctgtgtcaccgggcgtgaagtataagcagttgtctgcgccatttgtacagatggagaacatttcacatttcttgcgcgcatgccaattgcccccgctcaaccttccgccgcacgatgtcttcctgactgttgatctctacgaaggaaaggatccggcgcaggttctccaatgtctggcagcgttcagtcggcgggctaatgcccttgcgcccaacaaattcccccgaactgttggtccacagagtaagcgcggtgtcatcagcccaaatgcgacgggttcaagcaacggagcatactcacctcgatcggcccgctcctctagcaatgtcggggatgcaagagccacccttccatctcgaaccgatagccctgcgaaacccgccgggtcatacagtacttgggccaagaagggagatgaacaggataccacccctgcttggaacattcaccaatatggctacatggggggagcgagccaagggaatcaagggattgcatttggcgctcgccggcagatcaccactcctgcgcctgctgtgccaagtcttgcagagaaagagaagcgcaggcgggaagaggatgaacggattcgtcaacagaacgcagagagggaagaggcagagcgggcacaccagcgtcagattgcagaagaggaggctcgtgctaaggcagaagaggagcgccgatgggaagaagagactgctcgcgtaagggaacaagaacgtctcagggttgaagaagaaaagaagcgctgggatgatgaaaaacgccaatgggaagcggaagagcagcgacgtatggcggaagaaaaggaagccgaagagcggtttgagcaggagcggcaacagagacgaagcgtgcatgatatccgtctcaatggtcagttcctaagccagtaccagacctccaactcccaggtcggtgatgtcgccggagcaagtccggccgaggaaacagcccaaagccgccgcatcaaagagctcgaacgcgagctacagcaggcaaaggagcgggagcgcaagtatcagaccgaacgccaggaagcccagtctggaaagactggcgatcaggctcagactcgcaatcaaagtcgccctcgcccagttccccccaaacctagctacgatctctcttccctcgaacaagaacggcgactcctccgtacggagtggcagaacacgcaggatatgccctctacttctgaggccgaggaatccaaccccaccgaggagcaagcaccagcaccgcccgctcgtcccctcccaatgccaaagccaacatctttctctgcaacgccagcactccctcccagggacctacccgcctcgcctcggccccttccagacccagtagcctacaacgccaaccggggccacgaaagtcgcgttgatagtttcctctcctcgaacccagcacccgcgtccccagccccagccacccaccgattccaagactacacctcaacctccgaagtcgacgccgagaatagccgccgcgcagcctcacagcagaagaccaaggccggcggctgggcgtccaaatctcttctggaacgagagatggagcgcgaacgcgcgcgccaggaggagtgggctgagaaccagaagcaaacggcggctgcggccgagcgtggcagcaaagatagctcgcaaggctcgggacccggccagtcttgggatgttcatcagtatggctatatgggtggtgataatcagaaccggggcggtgttggccttggtgttggcggtgctagacgtcaaattattggaccccggccgccgcgataaactgttgacttgtgttggcaatttgttgggcctacctattcaacctagggttcttgtttatttgattcctcgtcccttctgttttcttactattcgtttttcctcctttgaagctccatttccccagtctctatcatcattgaagcagaaaacctattatcatttctgctttggtggactatcccgttatttgcgtgctatgattcccgctccaggccgtttctttcctttgcttttcacacgatgtggttgtagatagcgattatactcaaggttctataataaacacttttcagaagacaccgagttatagattgatcgcacatccgtaggatagtattggcatctaatagacagtacaggtactccatggtcactaagctaactatatatcacgacaaatatatccaatccgaagaaaaatgcaaagggcattcaacccccccataaacgcccatagactcgaaacccgatcgttaagtatcattgtcatcatgaacatcattaccacaacacccgcctttcctgatcccgcagcaaggctcatggtaagatatgctcgaccataaacttcatcctaaacccactctccttcaaataagcccattccaccgagttccgatcacgactagcctgctcacgacgcgcaatcccggactggacagcttcggccagcgacggggtcacagagagcatcttgttcttatgtaggagtgtcatcaaggcctcaagcagaatggagactttggcattgttcccgacgcttggggtagccgctgcgtacgggaggaagcatttctccagcttggcctgggtaaggtaattatcatcggagctgggggcggagctctcgcggaggacgaagagtaggagctcgcagagagtagagtgcgcctcgggtagaaggtgtgggaggttggagggactgataaattgttggaatatcgggagggaaaggtcccggatgttctcgacgaacaggtcgtagaggtcgtctaggggcatgaagtgtcggggcagcttttccgagacgctggataggatgctgaggagctgttggcggagagcgagggaagtgtagccgcctagtggagctaggttgctgttttcttgggagggtgttttgttcttggccatcttgatggggtctgtggcttcatccattgcatttcgcgttcctcgtcgcgttcgcttgctacgtcgtggcttagcattcgaacccttggctggaggtgataccgaggttgagctttgatcagcttcgaaatcctcgtctgaattgttctggtagtcgccatagtcattcttgtcgaggttgatgtcacctgccctcttcttggtgttatgcaactcttggtcggcaacgggaattctgagttcatctttgaatacctccttgaactcgccgagatttgacttgccattggcaaagattgcgcgcatgattctgcggttccgcccagctgtggtatttgaggcgatgtaacggaagatcaggctttctcgaaagattccaagatcatctgtcaccttcactgtctttaccttgggctttttgcccgtgtagttttcttccttgatcggttcagcgccctgcgaggcctccctttctgacctctctggcttccctggcaaaaccgaggtatccgtttggttttgttttgcctcttggtatttcttttcgcgctctttccaatcatcttcgagtacattgcacatgaactggagccatatttgccagcgctcccaccgggccggatgaagtactgaacaattaaatgcccaaccgacagcgtgccaaaaatcctctgcgcagtgccacacagaagcagcttggctgaattttgtattcagaggcctggtatcaggattgtcatgctcaacgagcatggggctttccgcacgccgcctaccctgtcgcgaagatccaaactgggtaaagccgaaagcgatattgaacgttgcatccgtgggaccaaccagggaattcgtcagtcgtagaaatcgcaaagctgccttgggtgcttctttttcgtactccgactcggcgcgcgttgttgttcttgggtgcacgagcatcgtggctgcgacggccagatgttgcggcaatgggatgaccgcctttgttgatgagatagtgcctgatgcgaggacattgaagagaaggctatatgcttggggccctattgagaaagcggaaatttatttagcagcggctcttttgagggtttcccccacgcgcgtcaaaaccacggggaaaaagaacatacataggctatcctcgaggaaaatttcggtctgtcgagccagctcccattgaaggggtacaggtgaccgatatggtacctcatccacggtcgccatagccagaggggggtttgtgaaaagccagctgaaaagatacattttgagctggcagtaacgcgcttatcgataaggagacgcggagatggcgtatggggtgttgacagaggtatatgtccggcagaacagtaggcagttggatgctgatatatgtgacattattaaagagcataagaaaggcacctaaagtggattctagaggtacgttaggataataccgtagtcacctcactaagagattctttgttaatcgattttataaaaagattgaacttctttgtttcgagggcggaaacaaaggcggtggaaagtatacagacaatgaactgtggatatttcttgctctgtgaggacctgaggcacatattgaggggcagttgatggggaattgacgaggttactgcatgacgagccccgaggccttgtgatcggcttacttgaagtatcaaggggtctgaacccaaatcctcaggttaggtatgtaggcccggaaatatatctcactttgcctctcctttgtttacgtcgtatatcctccgagcacagaaactggaaaattcgagggctaagaagtgacgaattcttcatcttatcttcatcttactcgagtcctatgatgcaaaacccgcatgtaccccagccaagagattgacctgcattacccgatcaaagctctatatgcatactaaggcctgattcttacttccatgtgcatagattgcaaagatatattcatcccttacattgtacaacccaagatgtcaaagtcatagcagggagccgaaaaggtggaagcattcgaggttaaaaatgcagggcttggatacttggaaatctagacaaggataagctgcctaggcagaccggaaggatgggaatctggactggttcgcagtgacttctgcgtcttcatatttgctgacgaaaagaaaaaagagaaacagaatgcgcggtggccaagaacggttcaaccccggccaatcattttcgcaatgcaaaggccttttatgaagaaaaggagaggaaggcgagaaagctcgggaaatcaaggccgcgtatacgccaacatggatagtggagagagagagaaaaaaaaaggaaagattaaatgggagccactatgactcctcgggtatatcggagaagagacctattcgcaaccgatgcgactgcagccaaaaagttagcaaatgagtttcgtctggctccgagtagatataacatacgaaaggcagcttgggaattaccactcccaatgtggccaggaagttgatagtaaagtgggtcaaatcgaaatgggtataatgagtgctgaggaggaagagcacgataggcacgcagagcaagaacttcttagcgggtgtgtactggtcgccattgtcgatctgctcccacatgttgagattgtcgtaggcaccggcgttgaactcgaacgggatgccccgcacccagtggaacatgaggaaagatccgaacatgtagctgatattggtgagggtccatgaagtttcctgcgagacgcccgggatgatatcatagaaaatcttgagtgcggcgatacacacgaaatggatggtccaggcacctacaatcaaaaatgaagttccacgttagtcctcagtttctccatttctctagcttgagatgtgttctccatcagctttttgtcactcacccttggcattcacccagtttgcattcagatttggcaatgcggcctgatcactggtatgctcgatagactcggccggctcctggtagataagactgctggatcgccttcggcggccttgttttgaggtcatgcttggagataaccgctgcggccctgtgtcaacatccggagggaaggatatgccacgaggggccaacagggaagacacttttgaattgtcggacgccagcttgacggtttccaaaagacaaaaagaataagttgggagagaaggagagaagaatgaaaaggagcgtggggatgaggtggcacggcccagactggagtttgccggtcggatcggcttgtggtcacggggtgcggaagagctctctgattgtcttcttttccttttgggcttaagactatccttttttactttgcattagaccctctataattagattgactttattttttcccttattaatctatttcttaccttttagattggcctacgacggagtagaggcaaatgcatcattggctgatgtacagtatgcatgtgcggaatctagcccgaaaggactagaactatacatgtactttatactagggatccaataaaggggaagatccctgatgattgattcccttttgtctggtttgatgaggatttcttgagatatttcttatcgttggcattcccttttatggggcaaatacgtctgagacatccatggctataaaacaggctaatataggactgggccaccttcgctcaactatgacaccaaattgattatgttgcccctttgcatacacctgaaacgagcatgtaaaaggaacatctggaggaagcacatgagagtgttcctacatctaatacccctaatatcatcttaggccaaatatggatcgtattaatagtcttatgcggccaaagacagaggccgcgtaatcagccgaatattcttgcaattataccttcaaacctcagagccgtatatgtctgcgtagtgaagagtccccaatctcattataacaacaagtgtatagggaaggtcccgagtgaaaaggctacagatagatgcagtaatcttagagccgaatcatggtgatgggacacggtgcatgactgtcgtcctggctgtacacagtgattgtattcggaaggcttaatagagctgcaggggaatcgtatattgtactagctaattgtcgcgggtttgccgtccggtttctttttagatgtctttagatgcatggaaggtcacctgctgttatagaaacacagatcctattagtagatagatgccttcattctgcatgacacgtccagtactcgactgacataaactgaagcagttgatggcgggagcattggctaggattccgtccaacatttggcattgctgtgcttccaagtagcattgcctgctatgggcgaagaaaagtaaatgggccgctgcttcatccactaagagctggtgctaactagctagttcgccagctcaattttgtaatcaatttgcggtaattggtcaatgagagccctaatttgatagacctaagagagcatatagaatgactctaggctgtgagccttcacccggcagtggctcatagatagccgatagtactttgaatcttcaacctaatgatccataatctatactaacatttcacacttgggagactatataagaagacggcatcaaccccactcttggcgtcgatctcctcgatttgctatacttcacgggtagatcttgcgcctaagacaacgcccagtctgaagagtgaataatgattagtttcttggaattagcattttcacttattatgcaagctgtcattagtacatagatgaaaccatatacgcatgttgagagtgacccgggatcaaagagtagtctacccgctgtctatatcacctcgagagcatgtcgagagcatgttgatattgatcaacagaccgttggattcaaaggttggccttagagctatagatgttgtattttctttttttttttgcgcttttatgcttcttattatacgtatgcctcggttgtatacagcctcaacgaggtccgctagtgcttctgtactgatttatttggggaaatcaaaaagaaaacgccagcctatagttttattcctaggtatatattacaatagaagtatcaaaaagcttatcggaacgcaaatcaagggactttatggcttatcgcctcatagatctctaccgtatacttcgcaagttcaagaattgcgcgaatggtcgatacagtctaccgtgaaatattctggcgacccgaattctatcgttgatccttgcagacttctcatacgatctttggtccaatacttttgtccgaattgtacgacctcaatggcaaattcctcagacgaagaggcggattcacgcacagccctggtgggcgccccgcgcactcgctcgaatccacgttccacctcgcgctccgcatcccacgacagcacccgcccggcgaagcgacaacgccgcaacagaaataagaaggactcagacctggctgactttgtcccaaaaggtgtcgcattcagtgccacttccttgccagtagatgatccagacagcacatctagttctggatctagttcagcctcaagtgaagattccgattccgatgcgaactcaactaccgtcgcaaacccacatgccggcaacaccgcgcctgcaattagctggaaccagggtcggaaggctgcagtgcgaactacacttgggaaacggtcggcgccaacaaacgagaagcctggtcaatttgaagcggtgaatgataagttttggcgcagtcgcagtgcatctgtttcggccaatggtgacgacaagccctcaacaaacaaccaatctcaaaacgatgatgagctggaagatggagaaattgactccaagagtgacacagacgattcagattctcttggttctgaagctgatgactctatcctgttgaacataggggagaagatgggaatggacggtgccaatgactacgaccctgccactttagctcatcagcatggttcaaacaccggagactcaaatctgaaaggcgcatctacacaatccggacctgggtcgaaagaggaagcattccggcttttctcaagcaaatatccaaatgcgcctgttgctttggtggacctaagcaagacagaccttgagctcattgcgaagtatgtctattttgatcgcagcatccatgatatcgacctcaaacttcctatctcttgccttgaatgtcaacgtgaaggccatatggccgatatctgcccagcaaaagaggtatgttttatcttgcttctagttacgtcattttcactgtactaacctcaaatatgaagtgtgaacactgtggcgcctggaatcagcaccaaagcagtacctgccccgactggcgacgatgccaaagatgccgagaacgtggccacgacgagccgcaatgcagtgcaaagctacgcagtttcgcatacgaagtgccctgtagctactgcggcagcgagcatctggaaaacgaatgcgattatctatggaagttcccaatcagggatcttcactccaaccaagtcacagtatcaatctgctgtgcgaattgctgcagtgcgaaacatcttatgggagactgcccagctaacaacttacgcgaaccgtgcacaacttcatcgtcgtttaccctgaagggtatcgacccccacatgatcacgaacctcaacactgtcctcccgccgcgagagacccgtccaccaagcggatctcgatcccgcggccgagacagggaatggtctcgacctccatccccagacgacgatgacatgatgtcccgcgtatcccgaggccgaggacgccccgtccctgcccctcgtggcaatacccgcggcagtatcaagttcgccagcggagtcggagctaaacgtgcgaacccgccccttccacggggtcctcctccaccaagaggcggcggccgaggccgtggaccacaacgaggaggagggttctcacgtggaccacgtggcggcggcagaggccgcgggtggtaagaagggggttttacctcttctgaatttgagcatcagatctcggcgaaagccatgtacatagcaaacagcacagtgtctaggattccgcccagtttcggctgagcatgtatgtacgattacatgacactttcttctatcatctctgacttcagcgagtacatttctcacgcgccatgttcatcatcctctcttgttccgacaaacccctcctccagaataccgatcaaatcatccagccgcttgatgcaaagatccgtatgcggatgttcttgcaaatgcacattccgctcattcagaagcaacaccgtcgcagcgccagccatatgtccagccgtcatgtcgtcaatgctatcaccaaccatgatcagattctcaccattagcaagaccccattcactcgcaatatgcaggatgcccgcgggatcaggcttgggcaggagattgggcgtgtcccgcgtgacgattggcaggaagatatggccgtcgagatggttgtcgatcaagttctggactggtgctctaagagatgcgaatgtcgtggttagcgctgtgtgtacatcacataaccggactgaatggatccatggagggttccaatggtacgtcctgattgcgctaattgctataacgtactcgaaattccgtgtgcagagcgcccgtcgtaagccgcgggatttgagatagtccattaaacggaccaggccgggctgtggctgctggtcggccatcgctcggcgttctacggcttgcactttggatacggctgtggcacgttcttcggtggggagtccgcggatgtgctgcaggatgtcgatggagcggtcaattcctagcgcttctctatagtaaggggtttgttagaggagctttcagcgaggtttggatttgaatggctcctaggcagtagatcatacctcatttcgctgaacatgtgatgctgtggcaaactagtcaatgttagctgggtttagtcagtacaaagttggcttgataacacaatcagcttggtgtcattggatcaccggagatgctcaattcttcctgcttgaagatgccagataacaagagaataagacagaaaggctggaatataatgtaaacttatcaactacgtcccagagcccaggccgcatcgagttatcgtctgacctggagtagatcagcatacttccccgaataggaagtatgtttctgcctgaatctcagattgatgccttaatcttcatttcctgccaacttcccataatagcatgaagacatatatatgatatcaagtctcaacttctccaaggtgtacccaaaatcgcaaacattccagcatggaaaataactacagcacatatcgtgtataaagtaggaagtgaaagagtgactcaccacaatgtaccatcgacatcaaacacgattcccttcaagagaggggcagtcgacgtcccggtagaaccgagcggtgcgaacttccgcggacgaagatatttgcaggcaatagcagacatgatggaacgagcagcgtttatattggacattaacagagggaggttgaggaggtggaggagttggagttggccgggtggagccgcgggatctataagcatcgcagtttagcgtttcccgtggacacgttcgctcgagtatactcgttaaccagcagacctgagggaagtacctgggtagataccctcgttcggggatattcaacttcgactgatgtcgcctctggttctttccctattacaacttcccattgcagcttcctcgattgtatatggccatgacttcctacacaggtcccaatcccaaaccacatcttcaacagacgagtcgtggtcttcagcatggatcaaaaactcttcgcagtatttcccatatccctcctaaaaacaatacatctcatcggttctctcttctggctgcaactcctctacgcagcctcctacctcgcacaactattctggggcacacagcgcgaatatccacccttcaagaaagccattgatcgtacggaaacgagcattatcaatgccctcctcggcactgttccactctcagcctatagttctgcaacagcaacagagcgtcagtggtacctttcatcaggcaatggtgctttgaattacgagaacaacatccacgcaacctcccagcccacctccaacttgctcaccacctcaccctggccagaggaaggacaccaagactcagattcctcatcagatcacgaaactcccaccccacggccgggcaccgaacatacccgagaaaactcccccatttaccagaccgtgcgcaagctccgatctaacacacgaggcagcatttcaaagatcgccaactcagcaagatccatcttccgacagcccctgaccgttttgccacgtgatatggacagtttcccctcagacgaggaacggaccgagccacacctggttccagtcccagtgcacgcttcgcagccccagctcgtccagaatgtctctttccccgtcccaatgtctgtatctgcgcgtgtcgcagatcacttcagtgaccctggcccagcgactgcaatcaaggtgcagcagccagtctcatttggggcgaccattgatgggggaattgattccgagacggtgcaaatgaatcgctcgagcaaatactactctgtcgagagttatcccgggaagttccctgttagtgatgcgttggattatagctcgcttgctaccgcttatgctgtcagagggaaggggactacctctgttcgacctttttcggactactaaggggtcttttggtgatggggcatctcgattggcacgacttattcctggagatgatatcctcaagatgattgcggttgtcgtttgatcggagtcttcgagttgagtacttcttgtttgtttctttggacatggcgtcagagttaatgctgtacttgggattctactgtttgttatattaattaccaaagatcgcattggccattattgtcattcaatgggatctccatattttgcagtattgactaccaggatatattgtccgttatctaccggtggatgtgactatccccaggactcactataaaccctgaacttgccatcactagcactaaggccacggcctgatgaagggggcagaagagctcatactgatggaaagtgctgtacatttttgaatgcaaagttgaagtctattgatgatgcaccagtctatcctacccaatgacaacgccaacaaatgctacgcaaaacgaatcaacccagatcccgacttttatttctccacctgccatccttcccatctctcgaaatcacccgtatccaaatcaaacaggtcgagcatacgtcccacgctctgatcaaccaaatcatccaccgacgcagcccggatataatacgccggcacgggcggaaagatgaccgcaccagcacgagaaacctccaacatattacgcagatgaatatcgctaagcggcgtttccctcgcaacaagcacaagcctccgtctctctttcaacatgacatccgcagtgcgcgagatcaaatcatcacagaagccactatgaatagcagcgagtgtcttcatgctgcatggaacaacaatcatgccatcggccttgaaagagccgctcgagatcggcgcagccatatcgttgatgttgtgcacatgatctgccaatgctttgacattcgatgggtggtagtcggtttcgtatttgattgtcgcctccgcccatttgctcatcactaaatgggtttccacgtttaggtgacggagggcgatgagggctttgattccgagaatggcgcctgttgcgccggtcattgcgaccacgatgcggcgacggcgcgtttgttgaggggcatggtcggtgattggcattgttgtttcggttgggctgcctccgggagaatgtcggctggaagatggggtgtgtgttccggagagaagagagagcatcgattagagacttcttgaaggtgttttggtcttgttgagcgatggttttggtttgtatactgtggagttgtgaagactggtgtgatgaacggctgagcttgaaccttggctcgttttatattaatgtgtggcgtggcaaaatgccgaatacccaggtctcacagattttcctgctgggtgttttgcatgtcccgagaaacaaagcatactgcatcggtccgattctggagaccccgagtgaagttatccgaggccccgaagccgagatccggggactgcgccgatggtcgcgacggagtttagaagagacttttccttaacaaaagaaaattggcataaaagccggcattactgtggactttgtgaaggtgtaatttgattatgactggccattaataccgcacgtacgatatcaggtttgaaaatttcatagaaatccattttcctgtgtataatcaaacatcggaactgcggcgtgtcagcttttatcgtcgaaactaggaaaacgatgcttacggttcatgatcgagtccagatacgtgacgggcgatacgtcgaatgggttggtcatgtccaaaggtccaacaggcctgttcagatgtgagcattcatctttaccatagacaggaaacttacccaggaccgaattgcggcagagtattcgggggtatccccgcccaattctccgtttcagtggcgctcgtctcctgctctcgttctaaggcgcttcgtaaggtcaccaaggctcggatgtgacgatccgacaaccattgactatcactttcggataaggaagcaccatcatcacttattcttgaatttgatgatgagaagacgtcaatgactttttgttgaagattgcgacattcggggtcattgcgcgtctcttcccagatgcagagaagcagggtcgaactcaacactgtatgtaccattgaccagcttcgcaatggaacagtactcaaagcctgaaaatcaagaaatgccctggaagcatcgatcaaacttcctttggcacgatcccgaagaatactggtctggtggagaaaaggctgtggggtggattgcttcattgccggccggcagagtaccgatacacagaaggacgtgtgcattctaagagctagatgctcgaggtgttgttgcattgttgtgcaattttcccgtgatcgaagatatggtaggccgcgttggtgagcataatccagccgctgcagcccttccaatgctcgatcagattcagcggtgctgaggttttccggtcgcatgatgtctaagccgatacgacagagcaagtgcattacttctgcgaatgacaagtcttgtctctcgaaaaacgagttagcgaaagaccatcctgtcacggagacaattggcggtcggtcatagcaaaggcacagtaaactatcctgccagataattgttgacctgtgggaagtcagctgtgatgcgagaagatatgtctatagtagtccgatcttcataccaaagatttttggccttcgttctcacatgatcaggccagtgaacagtacttctttcagtgtgcaggcccatagtttgagctagtcgaatcgttgtgcccagtaacgcccaggcggcatcggactgtcccatattctgcaaggtattccctaagataagcagtgcttgtataatatctagtgatggccgaaacaggaaattggccaagcggagagcatggaatgaacgacgggctgaatatcgttagctaagcttgatgggcgtgcaatccagcttaccaaagtcagttgacagttcaaatcgttcagaacacccaatatcggagtaatgagcccctgctgccaatgttgccagtaaaaggctgatatggccgatagacttatcggttgcccagcgatcagtgatcttctccgggtcgcgtaattcaccagatgcatgggcattgagataggtgcacaagtcagattcaaaacggtctatatcagcgagtattgggttgaatggatatgccgtgacacgatagaagtggaagaatctaaccggttagccgtattcctttgttgttcaattgttcgcaacctacttcaagacctctgatctctgaggcattacagtcagcagtgactgccacttttcaagtggcgtcttcgagttcatgaatgtataattgctgaaggtattttgcagaccaagaacagatccaacctcgcgggccaccgattcattaacgtctgatgctcgcatgcgaaggattgaggcaaccgaattgtcaccagaataaacataattcttcgagctatcatcaggccgtgcttgttgattgcttgctacggccggtgatctgggcgaagccgagcgagcgacactatggcgagaagctgatctgcacctcgaatgtgaaaggctgtaggtgcagatctcggggtgtttccgcttctgacaggtacgacatggttggcacccgtcacatttaacctttcgctttctgcatggatagcatgcatgggcctctcgctctcgactcttgagctgtagtacccggtctgcttcgccttgactaacagtgctcatgttgccgaggactccgaggcaccgggactagcaggggttgttgtcttggccaagaaggcgtgtcgattgaaagtgtcgggctctcccgatataaccacccgcatccgaactcggtactgggtgatatgggctgcggttttcgagactgagcaatgtagtaggccttgccaaaacgcaggtcgagttgagtttccgcctttgacagaactgcccaacagggttacacggtgacgtacgaaccacggttccgatattcttggcggtatccacctggacatgggtataaaattacataagacaaaaatatccatggatggatccatggccccgggggacctgtgaagatgacaaggcatcgtgtgtagtaaaatcccccgacgaacgaaggataacaatactttagatgtagatgccttctatatgctctaccggtattattaggtctattcgaggtttcttcagtatagaagtatgatcgtccaattcgctatagtatagctatagtctgccattaccgggagtcgccccggtgtcatgcttctataagacacttccgtacccgaccacttatccatagacaaacggaaacgggctcacacgtttgaaagcgatcttttgaagtatatatcgttgaaagacctttcggactcggtctactatcgtggtatagaacttttctacccaaaagaccctcaaagtaaacgcgatgtttctctatgctatcatatagtttcatctgcgacgtattcataccttcgcagatggccaggttgttgggtttaagtgataggtctctatatacatcttgaatttgaacactttggctgaggccctaccagtatcaaccaaaacctcgtacttcattccgcaaagtcgatgtcggataaaacgctatcctgagtcaatgactgactctatgccgtaccaatgaggatcttgttttctagccgtcccggtcaacacgttcggcaagaccttcccatgtctccctagtctaaaggaaacatcagaaagaatcaatgattataaattatgcgccccgtgtctccttgcgaatcacgttctgtgttgtatcaacagccacggagccccagaagaacttcttttctccaggtcgacggttcagctctttctcccgttggcggactctctggctgtgctgtttactccggcgcttccttgctttctcctcctttttcgcttcgggggtttgggggactcgatggaaaagatcgcttagccagcccattatgatggaagatattgagattcaaaatctgtgactggcgtgcttgggagacgaattaacagtgcggtaataagaacttggccgcgagatgatctggtgacaagccagaagtggatgataaatgatcaatgagatgcagttggcggggagagggagagtagcaagctcgggggccaacagactcgggggtcaacaagctcggggtgaagtccgaaaaagtgccacgtaaaggatgaagagggcgaggtgaggtttcagctagttgcgtttggaaggatcagaaggtgggtgcgacgatatattccatagcctgtttaatcagatgactccgcattgtcagcactagagcggtggatcatgtagggctgaatcaaccactgaaagatcgacaccggacattccgttgaggttcaggccctccgccctactcggccacaattataggcgccaagcccgccacccgcccccaaactacgtacatgtcttggctaagattgatccactgtataaatccaggtttttgcgaatcagatatggcgtaaaaatccacacagatgctgatgtccgcattgttcctagaattactagtggatataccgttgagctgatatcaaaacaggtccacatggagctttaggcgacaaaagtccgtatggcgagcgtacgagtaaattcacaattaagcaagatgcatagtgaaaccatggatgttcacagggtaaaaagacagtatcatgtgaccttaggtcttacattatggattccaccattcaagaggtcaccacgtaagcacgatgaattacgatggatattcggcacactggagctaaaagtcttcttcgaagagaaaagtaattacaacagtatgccagcaacaacaagtaccaccgcaattaaaagcatctcggatctttcctttagagctagaatgagcctcccaacgtgaggtatatagccaatgaccaagcccacaatctcctgccgatatatagatgaccggcctttcggatataagaggacatcgtccacctcgttgttgtcccctttagtcagtatgagctgcctataccaaattagcatatgatctactctattagaagccagtctgaagtaccttgcgggctctgatcgattcgttatcttgtaagagactttgatggcgcgatggaccatcggcaaggggcggccaggaaaccaaacaactgggatatcgcctgcgcggatatgctcttgctggttccataacaagatgagatcaccgcgccgaaaggctggctccattgactcggatgaaacgaccatgattggatactttgagccactgatcgtgcaagcccctttccataacatgaacaaatgtgctatgccccataaaacaggcaataaagaggaagcaaaacaccggaaatagcgcgagtatcgcattttgacgtgtgttgcttctttgaatggctgtaagaatagtatcaagagcaactatgtcggagctggaagattacggaatgactgcctccgcaaatatcccgagcttacaacctatgaatggccccatttcctatttaatcgtgccaaggtggaaaaatgtaactctacatgcaatatagaatcctgtagattagccttggagcccgcaggctggctcccgaatgtactagactaacccattgagtttcaaggtgtaagcacgagtagttaatgagacccgttacgccaaagtcactcacctcgcgccgatagtggtggggatactatagccagattgacatcatcctgtggtccttctttgcgccacgagatgaaaaggattctgatcctagacaggtgaggcatttcaaggaagactacgcttgccagtttggtcttcggggagtgtcaaaggtataagaatggccttttcccactctgaatttctatcaacatactccaaagcttctcttttactacttcaatcaacggtctaaaccctacattcaatcaatcaattacaatgcacgccaaagtcgttctcgctggtgccgcactgacggccgtctccatgatcccctcgtgcccggcacccatagtcggaggtctcatcgccggagcgtttggtgccgagctcgccggtaacctgatctacataggcctcaacgacaacctgaaaagaagccccgtcgatagctccgtcaaggcccgcatagccattggctataagtctcgtcgtgcccttgactatcctggtgtctctgacgaatctgtccaacaatgcaaagactctaactctggcaaaacggacgtgaaagtcactcagaccgaggcacattgtaagtaaagcagctgagcccgcaaatgccaagtcttgagcctttctaaccgatatccatagcctaccggattgaaaacgtgaccccggaatgcatgaacctggctgccttgttcactgaagacagcccgcctgtcccttgtggctctgcttgcctccagtactcaaacctgagtgaaagtgacaacaatgcactgcagggttacatccaggagctcctttaagtgaacccagtggatagtgtctagaacaggacaagccctgttgatcgcggcggaaaactctcaacgtacatttctacatgtctttaccgcatgtacgattgatccggccggccacatctatatgtatatgtacctatctttgactggctttcaatatgtctgtcgctacctacgtacaataaaggttctatttcagtaccgattgtttcaaagaaaagtagctgtggattcttccgtaatcatactaagtaatcaatagagtgcttcaagagaattgtgtgagtgatttctagtctctaacaaattcaatataataatatctccatcatttcacaccatataaatagcctgcatcaaggctcgaataattgacttgactcaaaatgcaaacagagtgtgatcatgggatcatgggatcaaaaatggaacagatgcagccttacagtgggatgtgggttgggctgatgcaattgttactcttggcagatccttcataactaagattgtgtaagtgcttacggcttttgggcaccggaaattaaatctacagcttagcatgctagctagcgatgcatgatgacgaaggtgtaagcgagtcacgctttgagattttgttgttgagttcaaagcatgtggagattatacagcccgtacaatcaattgcgaggcataataggctgaacttgtgcgacttatgtctcctgctagaagttgacaataccctggtgggtataatttacccagttctgtatattaaacccatacccgatgatttgtgctcaattcatctttgcggttacatccgatgcctctagggtcacttcaaataccttggaaccgaaagagaagaagactagagcacacaattcgtgccccatatcagcctatcggtcgtgtctttcttttagtcacgtctacacccttcaacctgacgatgtccacactcctcattcctccagcattctttggcctctcggccttggtattcttggtcgcaattcaactgcctttagagtaccgagtacggctttctccattgctgttcggtagtgcatatgcatcgctctctgccagccactatttggacgcccttccaagcgttaacacattatggggactcctcacctgtatctggatactgcatgccatcagcatccttttcattgacaaaatcactattcctcgaggtgctccaccatggactgcggcatataagatttggatgaaccctcggcgtcagttggactgggattccattatatcgaggaagcagaatacaaactcaacaagcatagcccctttcatcattaagcgtctgtttaaagccggcacttgctgcgttctccaattttgtatcattgggccttctgtatatttgaatttctccttcacctcacacgattttggacgagttcaagagatctttatccgaagattaatctggtcggactatgggccctcgattactccgcgcgaaattcagacgaggatactcttatccgtatactggatctggctgacatacctcatgctggacgtttgtcatattctactttcagtcttctttgtcatcttccgagtcgacactcccgaggaatggcagccattattcggcagcgtgggagaggcctacggggttcggcgcttttgggccaaattttggcaccaactaaccacaccttgctgtgcttcttctgggagactcgttactcggctgctcggattcaaacccgcttcatccttcgagaaatgctttattgcgttctggactttttttctgtctgccatttaccactttgttgctgattggatggctggagaaccttgtcgaccgatgaatgatttgttcttctttcttatcaactttttggttgtgacagttgagatatttgtggcttctgtctggactcgagtgtcgaatgttgagattggaaggggtaagtactccaatgcctcaaaaaggcaaaaatttgcaggtttcatttggctcctgttattcttcttctggagcgtgccaaaatggcaatactccaagctccaggctatggttgaacggctggaatattcaactcaggattagtatctgtgatatattagactcgagagcattggtttcgtcatggtctctagttcattttcatacatgggggcatgtaaaccagctcagcaattggagatgcatgcattttttatgggagaaaaagcttcattttgacctctggaggttacaatacacggtatagagcggtatagagagcggttctaattcaggcattcagacatcaagaagcccctagttatgggtcttcgtagtcgccagaaaaagttcaagagatcatatacgagatgccggagaggtaatgttacggcccccatttctggacggatatccatcttggcggatcttggcttctcataaattagaaggccagttgcaattagctgtacttttgaagagccaggggtaatgtgggaagaatatggaagcccccatggtcatacaagcctgatattttggagccaggattcatggcctaggccatattcgatacaacgatttcaggatttgtggaaaatagaggcattgagaagctcctgaactttcaatccaccatactggcaggaagtgaaagcgacttttttgggtttgtcgtctggttgttgagaaagatccctagcgcgtggccgggcaattcccgatatccccgataagctaaatcaacgggcccccaagcatcgtaagagacacgatactttggtagctcccgaagatgataccgtgtacaataacataaaaggatttagctttggatttcaagcgaggtctctatgagaatcccccgctcatccagcacaaataccaaatgaagtacaatttggggacccttcgaaggcaagcatacggatgccttggctgatgccttggctagtgcattcagcggggcgcggcccaaaatgaaacggaactcgcgacctcgatcgaagaaattattctacaacatacatctccaatatgatattcctgtccctccctcgcgagatacaggttatggttatttcccgtgtatcatcgattggtggtctggccgctctgtcgcggtcatgtcggtcaatacatcacctatgcgacatgaaaacacgcgagcggttctaccagatccatgtcgaaccgaaagactacagcatcaacaagacttttgacctcttgatggacatccttaggaaccctaagctgggaagctatgtacgggagatcgttcagactagagagcccagcatggagcaccactacgtccagacggtagagcagcgcgaccttactgcgggcgatagggatctcctccgcgcggctgtgcggaacgcgggctttgccggctcccaagaaagcgcggtgctcaacatgctcatgcaaaacaccacgaagcccccgggtgaaaccggggaccttttcaggttctataataccgcttatgggtccgagtaagaaagtcaactcctagtcaattgcttacctgagcgctcacaagacaaacagccatggtgagattcatggcacctttattgcgcaggcattggccgcgatcctcatctcagtgtcgcccaatctggaatccttagagatgacacagcctttcagtgtattctctgggttctacaggggtggcgagaggccccaagaagatgatgttcattttcccctcgatcgactcctccgtcgggccaatgcgaacccggctagtattgcgtaccttcaaaatcttcgcaaggtgtatatgatagtcaatgataggcattcggatgaccgtttctatatggccatcgacttcttggaatgcgtaacgctttttgaccgcctcccgtctattgaatccatcagcaccgatgccctctgtgacgacgaaaatggcgaggcgcgcgttgtgctagagcccagatcgtccaatgttagcagaatccatatccaccactctgccctcccaacaatatttcttgtctctctcattcagtcctgcaaagtactacgagaattccactacaccatcggtggccggtgcgtgctaggaggctggactacgccgttcaatgccaggaccttcatcaaatcaatttgcccgcacaaagacacactggaagtcctggatatagacgccgagcgcaacatgcgctatttccacccctcttattttgaggagaatcgggttgaccaggaaatcgataaagagcaaagagcgctggaaagtgatgatgacgataatgatgaacgccaaatgatccggcacctctcgagtaatagcgggtcactaaaggagttccggagcttaaagcgattaagtgtgggcattgggtttttggtatattttgctatgggcgtcaggggaaatgacgaaccaagacaaccatgtctgctaccggaggctctccccgagagtctggaatatctttgcattcgagggtacgagaaagggaagtgcaagaagtgggatacacatattgatgccctggtcgcctcctttgtcctaggctcatcggggatcaaggagatcacaggaattgaggaaaccatccccaactccgaggatgtggaggatccggatggtgacaaagacttgttgtggattccgagatatgatgttgactactaggccaaggtctattctgacccagagaatcctccaaacccgttttgcatacaaggtttgtctatgagataccctaataattctaaaacttgtacatatatatggggggtcatccacactctagtctgccgggcacattaatctgcccactcgctagtctgtgttgattatagattcagcgatctattcagcttgtacccgagacaaaaatggtatatgaaaaatactataaatgcagagattctaatcttgttctctgtagaatgtaaatgaatgaatttgtctatcttcttcatatatggaaagaagcccctgtttatatgtttctttttcgtgtaccctattatgtcatattagaaaggatcaatatggatcaatacgaaaatagtgagtctaatagtaagaagcaaaactgacaggcattgcaagacggctgtcagatcaagcggcatctccggtaaaaaaagagaggggattgatcgacattctagtatatgcttattcaaaataacaaaataacatacaatcttcatttactcctctcggaatcccatctttgtccagttggccaaaaccttctgcttgagctcctcagggtacgaattctcgaaatcggccgctacccaatctcttccggtagtatactcacatgggagaagtgcatcagaaacaacctttcctccctgaaccggcgatccgtttccatgcgacatgtatggaataagggggaacccgcgcacatcctcgtaaaagatctcgtcgaggttaggacggcagcgagtcgagaaagcccacattacatcctttccattatagacatcgatgtcgtcgccgcaaagcacgagccggtgaatggtgtagccaggcttacagttgaagaccagatcgccgaccttcttggagaactctttcggggtggtcttcatttcccgcagctttgcggtgtcaattctcagagcgacccaggtcacttgggactcgaacggcgcgaaagcatcagtcaccgggagaccggcttgttggcagaccttgcggatctcggcagcggccagtgagccgatcatggtatgctaatacttgttagtagggaacaggcaagatggaggcgtgtggcttacagtctcatcggttagtcgaccgcaagatgacatgggcataatggggttgttgcggtaggtgatgcggttgaccttgtacttgggccacaggtgtgtatctccagggaagacatagccgtgcatttcaccgaatggaccctcgggacccttgtccgtgatagaaagcgtaccttcaaagacaatttcggaggtggcaggcacatagagactgttagtatcgcacttgactagatccaaggcggaaccagtcatggcaccgacatagccagcctcggtcacaccatcggggatgggcatgctcgaggccatgatcgcggcagggggaacaccgaaggctagagcccacgggacgtcgcggccttccttcttccacatctggtggatctgccaaatgtgctggggctcaatgactagaccggtcaagtgcttatcgtcggagaccattgcgcgggcaatagaccagttggtccacgacccatcgggggactgaacaatgtgcattccgtaggtctggatgtattttcctccatcggcctggtggatttggggtgcaggcagtttggtcagatcaatctggctttcttggaggaagttctctttgcaaggtccggtagacacgatgttgggagggatcggcgccatggtgctagccgagagcatcttgtcaaggatgtcgcgcatagatgcggtcggtggcaaggccaggtgtcgtgcaagtcgaccataacgatcctttggagacttcctgagagatccgggggcacccaagatgcggaagaggccgttttcagcaccaatgaggttgttgaagagcggggccttgtcgtccgtttcacagacaagacgagtaatggcggcggcttcaagattgggatcaacgggagtgtcaatctcaaccaggtcattgtcggccttcaaggcctcgacaaatgaccggaagcagaggtgaggctcggtgttggccattgtgaatctgtctttgtaggtagaggttgtgtatgtgttgagtggacttggacttgtgaaccagggcctcccgcaatccaaccagcttaaatacccccgtgcaagtcttagcacggtaatctcggatcgtcacacatcaaattcaggtatgacgggccgattcatccatgagagttctcggaatgccgcatacttcggcactttcgcaggcgccgaaggccccactccgaggccccgaggtaccgaagaacgatccatggaactcgaaccacttattctggatttgtatgaggaagtcgtcacgtggcttcggacgtcggaattgttgtcatgatgcagatggactattgccgctgggatcggctattaccccaaaggacactcatatgacgtcggcacttcgatcggcagttgggaatacatgtacataactaagaggggttgacttccagaagcacagaaacagaaacagaaacaagatacgtcatgttctaccaacccggagttacagagcacaatcttccccacgacccgttcaaggtgaagctccaggacggacaatggacgacatagctaacactaacaggcgtgcgtggtgcctcgtccgatcggatggatctccaccaagaacaaagagggccaagctaacttggcgccttactcccaattcaacaaccttacattcgacccgccatacgtgatgttctcttcgaatcagaccgtgaacggcacgcgcaaggacacggtagtcaatgcggagcagaccggacgcttcgtctggaatctggcgacgtgggaccttcgtcaggccgtcaacatctcggccgagcaagtaccctatggggtagacgagtttgagcgcgccaaggtgaccaaagagcccgcaacgctgatggatgtccccatggtgcgggaatcgccggtaaaattcgagtgcgaatatcattccaccgtgcggttaccgggaaatcctccgatgggcaccgtggatgtggtgatcggccgggtgatcgccgtacatatcaaggacgaggtgttgacagatggaatcttggatatcaagaagacgaagccggtcgcgcgctgtgggtactatcagtacacggtggtgacggagacattcgacatggtgattcctggcatgtcggaggatgttctatatggcttagaagggagtgcgaagcgaaatcgcgaggctgaatcgcggaatacgtgagctgggtgatgccaatttaggactgattctagaactactggctgctatgcccctcctctgccagcgagtgtagtatatggttctttctaaacgccccatagagtcatcgaacaatggtcggatcccttcgatataatagagctgagtgaaccttttatggcacggcctttcttgtgatggtagtacaatctgaaggacagacgggctatttatgcaattctgtttgcacccaccactcgtcctgttcgagttccatagcagagcttcgcttttcctgctcccgctgtagcatttttcacactagacggggaacatatctttttcctctccctcgagactagtcgctctttgctcaagcgggatgtgctccccacaacttagtaccggtccttgagcatttcccctattctagtaggataataccgacctgcaacatatcctgggatagtttcctcctcgattgcctggatcgttggtactccgatgaaattcggattggtgaagtcgagaggtgtccatattcgtccgagctgcggtaaggactgaagaaaagacctcaacatgtcggagataaagaggatcgggttcttctacagcgcgttggatttactttcggaatacagcttagtggacgggagtgccaagacagtggactcattggtgacagaagatggccagctgaggtcctgcgaaggtccagccttcgaaggttgatctacggcccggcccgtgaacggaaccttggaacctttgttctatttacaattgaggaagctacaagccctcgggtaagagggaaagaaccaaaaattccttgggtgacgctgtgtctatggtttgtacaaggagcatttcgagtattttcggcgaagcttgatcactgctcccgcttgaatcgggatcagggatgagtttatatattccccttgacatctacatgaatgaacgcaaagactgaaagatacttccacgcctcgaaattggaatagattatgtttcctctgcaccactatctacaccacaacacaaaggctacaacaagaggctcaaacgcccacgcccactagatgcgcgagagcagacgcatgccccggaaataagatcggggggaaataggcagagaaacttagcgtagaaaaagccagggaggcgaagagaagacataacttcccgctcatcccatagccattgacatgaaacatgaaaggcaggaaatattgttagacatttaaacacaaacacacacattgctcatagatttgggatgaaggactgaaaccagagtcccaatgaatggtcataactgtcgtaaggagaggagggaaaagcaaaagcgctagatggaaacggagattgaaaacatcaacccaggggtatcacagtggaagtctcaatattgctcgtcttcatagtcgatttgcgcgggactgcctcggtagcgggttcgcttgatgttgcctgggctgtaggagccggcagatgtgaggggacgcgggccagttggcttgcgtgtgggaggagaatagatggcagagttctggagaggttggaggttaggatttgtttaactgaaacggtagagagggagcctctggaatacatactctggaaacaacacggtcgccgctgtaagctgcttcctcgtcatccgccactttgggttgacgctcggggatgagagggcccgcgtccttgatcttgggaggacggggtggacccggtgtacggtttgcgcgggaactggtctccgagtagcctgcgtcggagatcggggacaggcgcgtggcaccactgacaccgctgacaccgctgttgcggttttggggagggttgtttgcagacaggctggggttggattcccactggtctgagccagcgggagaaacaggacctgcgtaggtctgagcctcggtttcgaggcgagactggtaacgtgcggttgggccttgtcggggctgagggtgctgcagctcaagactaccacggtggccacggtacttgggcggctcagacacctgggaaggaactaatggcgaagggggtctgttttcatcttgctcgtcattcagggtataggtggatctgattctgtcatctccctggggatcataataatcgcctttgtaggggccatgtggtgcgaggtcagacccagaccgagactcgtccgaggtcggacgttctttacgggaaggctggatgctgttgcgaatgccgtcgcccatcgaggtagccgtggacttagaccagcgtgagatcttcgggaagatggacgagctgctggacttgtgcttgcgggccttaggggttgtctcggtgctacgagctgttgtggccaccggcttgcgcggaggagtgtcaagcggcaatgaaccagaccgctcgtgacggggcgcatcgcggacagggagatgcgaagtcaggaactggtcacgatcatcaagctcaaggtcttcgtcaacttcatggacagtgctgactcgctgatccgaatctctgcgctgcccattggccgggcgagaagagctggacccgtagggtgagcggctcgtctcggcagatactccgttttgaccgggggtctcgtacccgcttggctccatgcttcccattctgtgagggctaaagccatcttgtccatatcgcatggcttcaacctcgccaagcagctgctcaagcatgccttcaatcttggccaaatcaccgcccgacttgagactcagccccttcagtgcacgcttgaagatgctcttccgcttgtcgtcctcgtcggccgtgtttagctgccgattccgagaagcactggggggcaatggccgaggtccaccaagcgccctgtgagtccgctcatgtcccctgtcactagtgtccatgatgagatcatcttggtcggcgatgaatttcttcatctgctcgaaggaggtgcgcatctcagcagcacttcgaaccaaagtaacaagaatctcggtatctctggcattccgctgggcatcccgaacagtcaagtgatccataagagccacaatatcctgggattggattctctcaatacctcggccggtcgcgctgtcatagagtggtgagccgacgccgtgggagtagccactgaagtggcgttcgtgaccagaggcaaaaggatcgtctgccccagcaggactatcgaagctacccatcccagcggcatccacgcccgcaagacctcgactagcttgcttcggggttccgatgctgggagacatggggttagcagccgaaacatagccttcatccttggcaccaggaggggtaccgaacaattgccggggttggttgtcgccagagtgggcagagtagtcatcgccgccgaagatattctgggcagtctggtagtattcggcatcaagtcctatctgttgctcggcattgagacccttagacccaccaatctgggtatcgtagtagtgatcggccggcggggacctggaatcatacccccagttgtctgcctgggcgacaccaccaatagggccctgtataatggacggattggtgttgatttcagactccgattcttggctttcatcgtcgccgcgaggactctccattccacgcggggcatgggcagccatcatagcagagtcgtccatgtcctcaaaagattgggtaacgctctgagggggcgatgtggcacccatccgtcgagggaacgaggtctcgtcggcattgaaagcatcctggcgttgcttcaagggacttccgcggtagacttcgcttcctggcttttcggggcttcgactgcctgatcgtggagccagatcggtttgcgagcggttcgaggatgtaacttgggattcaaggacagaggggtccatcaaggatgcgactgcagattcgacggctatcgggtgcataaattgagggttagcagcaatgccggtagtcacagggtggccctctttgactttctccatgaagtcaacatcgctatctccatcgtctccggagcgcctgctctcttggtcatagccatagaagccgttgtcttgggagccctggcgcgaatgttcgtatccgagcccaggtgattcatggctgtgctgcttgaaaattccactctggctgtgtgagctggtgccctgacgggtggatctcgcgaggtttgtactaggggcggacgatagagagtcaatggatagttgaggctcaatctcatgcttgccgtccacgtgctgctcgccgtgagccgagtaatcgttgtagtgagtatgggtatgatcacttgcaatgctctgaatggggctcagtccgcggccggtgtcatggtgatagtcgttttccgtttcacgatgtccgggctgagcggcgtcaaggaggttagctgcggctgcagctgcaattgcccagttaccgccgtcggttccaggagattgactctgttgatgcaggtcccgctccgaagcactgtgcaccgagatattatggtgcgactgattgccatggcgcatcccgagctcataccgcgagtcgatggaatttctggtaggagtgcgagaagctggggacatagtttgcctaggcgatccgcgagcaacatcgaagtaggaggcctgcttttcgggagtgggacttgccgttcgctcagagagcaacgagtttctagttaactcggagtcgatctcgctgtgcattggcattggcgcaacattgtgcttctggaaaacaagctcggtttcgttgtagttcatgctctcggtgctcttgcgtgaggcacttttccgggagccactatttcggcggcgctcctgtttgccgagactagagttggagtcgtggtgtttcaaagaagccgctgtcagagcagaaccgactcggccagcagcatgggcttcacgaagacccttgctcttctgcctgcggatcttgtcttgttcggtgtattcgggtcgattggcccatctcaccgccatatcggaggcttcgctgcttttacttgatttgcgctccccgttgcgtggaacagcctcgggagaaaggacgatgccttcgtccttgctatccttgttcagaacaactttgggcttcataacatccggcgcactggcgtgcttggagagacgccgacctagctcatccctggaactcgtgccggatgaataagatgtagccatgtcccggtcaaatttgttcttgttggtcatgactttttggtccttcttgagctcctttagctctggtaggatcaatcttctgatcgcatcttcgaccgtctcgagtaattttgggttgttgattgaggacttggacgcaccggagcgaacggagtactgatcagacttgtggtttgaagagactgcagatgtgctgagaagactagattcgggactgatgatatcctcttccgcatacctgtgctttcggcgacgggatggttttgtttcggcttcaaggtaatccttgcttcccttgcttttgtgtttgctgccggaagcctcttgcggtgatccagtgagcttttctgccacgcgatgcgcaattcgctcatgactcaaactgcgacttcgttgtcggtggggggtcttgagcaatcccttatcttcagtgggcgagccacgctccatactctggctgcgcttccgcctggggcccgccgacgaagcgttgatcatgctgtccggcggcatggatgaaacctctgatgcggtgttaatgtatcgggtgtcttgcgagagggaagacatctcgctgtcctgtccgcggttcacgaattcgatttctacgggctcgcgacgtgatgaatgatgaccctcttcctcgcctgaattcgagccaaggctgtggtcatccgttgcgcccgtatccaattgcttttgttttgaggatggcgatggtagggatattcggtgggtatatgagggtttgcgggtgccgcttccgcttgattcggtgatttgaaagtggtcctttttgtctctggacttcctagccgacgatggtgtgacacgtactcgcacgctaggacgagagacaatgccgcttgagcctttgccgccctcgaaatactcgatgagtaatgaggtatgagagtcgtgttgagaacgagacaatttctcgtcgcggtcccgctgtcgccgagtggagacagtgatggggctaccgtcgtctgggatagagtacgacgttttgtctgtgcggcgagaaatgtcagttgccagatctgtgcccgttgcgctgtcccccgtggtatcgatgatggattctgtgggggcgggaagaatcggtctgcgggtattgacccccatgatggtgaggcgtccttcaacccaatcgcatgctccgtggtgctcgaccgaggggaggatgaggggagtgttgttggggtgatgactgttgctccgcgctttttggcacgatggggaaggacaggttgtaggaactcaagagatcctacgaattattttgataggaggtgagagcgtaccagcgcagaccacggaacagtggggaagaagaatgtggaattaggaaggagaggaaagcaacggtgagtctaaggtgctgtcgaagctcgccgatcccctcacatgaaatgatgaaatgtgatgagagggaaaaggggaaagaatttcaagatctgaggaatgaaagatgaagcagtcgaatatcagccggtacccttgtaattaagacggttgcccagcctcataagaagaaaaaaattaaaaaattgaagaggctggatgagatgattgtacatcctaggttccgagccgcgtgggccgccatacaaagagtacccgacaactacctacacgaaggtacagagtacattgtaaacaaacggaaccctgggatccattcgggatcgtcttttggttccttggttccttggttcatctccattttactttatttggttttccatcttttgatatacgacatacgaagtattgcttgcatttcagcttcatctccccaaaagctactctgtataaccctcgctgtgcttcgtggctggggtaatcttggcaaatccaaccctcctaaggactaacacaattttccaccacaaaacacccaaattaaaacgggaaaacacttcggtgtacccgtcacacacgaacacatatggtccacctgcagttctccgtgggacccgcaaaagacaaggcaaaagaaccggaacaagcacaccgtcgcccagacgacagagaccctggagatcgggtgattgggcccagcatctgccagctcatcacactcgtgtgctcgggctttcaacctgaccaacctctccatggtgaaatgattggacttactggaatttatgaaattgttggccgaccgcccgcatacaaaatacaccgacaatatttcccaacttttggccccagactcacttatccgggatctcaccctgtgaccgggcagaaccacacgtagcgcttgcaaggggtgcaagcaattcccatcgagacgacttatgcagctggggggttgaggcattgctgtatctcgtacattagtggcaatcgagctgcttggctttgtcattggcaaacgatcgcttggccataatactgcgtaatattccaaggctggtatcttccaattggatcggctcggcgcgtatatgagggttgtagaactcactacggactacatgtaggtaccaacatgtacttctgtaaggatactcttagtactccatacggagtatatggattctcattgtgctcacctcttctgtagtcctcctattcttgtttggagtcaagcccctcccacgtggaaaagctccgaagcccacatggctcaatgaatgcttactgtggcattccgtggggaaggaataagccttacggtcatcacacaatcacagattgcatgattggcgtccacgggtctagatatattgagctgatcaaagggaactctggctgagcccttaggctgagggtatacttattatgtttactatatgtaccaaccatcgaccaaggcgcaaggggctttaaaagattgatccataccaatagtaagatgcgttcgactatccctccgctagtcatacgaatattcaactcggatgtcatctctctcatgattacgggatgaaaggggaaaaagttgaaacccaaatagatatatccacattgctgaactccaatgtccctaaaataaaatatgcagagacaatcgatcgcttttgatgttcatacagattgttcttagtcattgtgcttccgcttgaacttaagtccagcaccgtgcttgggctggctaccgtacgtgcggcgtccttgctgctcctgcttcttatcgcggctgaggctggagcccagctggatgtcaatgcgaggcggggcattgaaaccgaagcccttggcaatcttgacgaggtcaagcttgttcacatcgaacacagtgcgaagggagtgcgaggcgtatgcttgcaagtacgaacgatagccatccttcgccgacttgttgaggtagtagttctggccgatgagcttctccagctgagactgcacattgacaatcttagaggccgggaactcgaactccacgacaggcacacgcgcgtccttgaggtgcttcaagaaaccaacctccgaaggctggaggaacatcagactgcgacccttgccttctttaccacgggcggtacgaccgacacggtggatgtagtcacgaggatcatcagggggatcaaattggataatccaatcgacagcgggaatctggagtttgagtcagttatggaatagacgtggtaattgggggttaggaaacatacatccaagccacgagcagcaacatcagtacagatcaaggtaccctgcttagcattgcagaactcgaagaaagtattggtccgcttctgctgcttctgctttccgtgcaattccagaacggggagatcgatgtagttcaaaagctcggcatggtacttgacgcagctgcagctcgagaagaagacaataatcttcttcttgaggttacgcttgaggaatgagaagagaagcaagaaacgcttgtctgcctcacacactacgtagccttgttccagacccgcgactgtgctgtgctccttgctgtggtcgacgttaatgtaaagcggtccggggcgcagggatatccgggccagatcctcgactttagttgtctgtgtagcactgaagagcatagtttggcgctcctcagagggcagaattttgacgatctgacgaatctcatcttcgaaaccaacttcaagaatccggtctgcctcgtcaatgaccaaggtcttcaggttcttgaagacgaatccttgggtgttctggaggtgatccagcaaacgaccgggggtcgcaacgagcaggttgacacccttcatcagcttctcggcctcagcgcgacggttggcgcctccaatcacgataccgtatgtctgcgagtggtgggccatgagctcacgggcaacaccgaatatctgcagtgcgagttcgcgggtaggggacacgacgagaacaccagtacctgcatcgaaatagttagtcatcagtctcaatggcaaggaaatatcagataaaggcatgaaggggggaaaattactcaccgtttcggggcttgaagcgcagggcgtgcagcatctcaatcgcggggagcaggaaggccaaagtctttccggaaccagtcttcgcagcaccgagcacatcccgtccggcaagcaaaggaggaacggtacgttgttggatctcggtcatggtcgtgaagcccatgtcgttgataccctgcatggtcttctccgaaaggttgagctcagtgaacttctgcagcctgccctcagtctggggcaaacggacatcttccatagtaggaagatccgtaccgttcacagctgcggtgtcttcggcatcatcgccctcctccgcatccacctcctcaacatcctcaacggcctcggcctcgtcggcgctctcttcctcagcacttggtgaagggctaaccttgcgcttcttggtagccttctcagctgaagccttcggcgtcgaagcagcactcttcttcggggtcactgcggggctggatttggcttccacgggtttggcgacatcactctctgctttcgagccgtgctttctcttgcgcttgttgatggactttgcggtgtccacggggccaggcattttgttgattggtcctgcgacagtgcagtatttggcactgaaacaaagcaatcaagggtttgtctcgtatctggaccttgtgttttgcaggtctagattattgatctctgcgggcgggaatcattctgctacttttttttttctagtcggtgagatgtggcagaactccacatcacgtgctgataactaggctcgatcggtttgtgccttatatataaggcagttgaaattatgaccttgcccacgaaattctatttcgaccataacttggatgtagcacttcgagacaacaaagaccacatgtgtttcaagtttaaggaccccatattttagatattaactatcaattcttcttacacctgagaataagtgatgccgagaaggatatgcgcctggtgggttcccctggtttacatagtggaacaaggacggaatgttagcttgcaggctgtgcaagtgccgctatcttagccttaagttaggcagctgagttattggagtatgtgtgacatatgtttacaacatgcggagtacaacaagtgactgctcagtcgtcgcacacatctatcacgccaagagctttgtctttgtctaggggcattggtcttcagtatccttacggattactctacatgcatgcataaattgccctgactgagtcctgctctagtttctagccgagtcggcttctattcctcaataagagttactaagacagtgattacaggggcctagcttgacagtctagtatcagcgctcattttccctggaagaagcattaaagagaaacctgagtattgcttgcacattgcaacagagaactgggaacaagtataaatttgcaaacaaagagatatcagtactccgtaactataccttcaacaatccaattgcagccaaggcagagatttctagccaatctacggagttggtatagatggtatgcaatgattaagccgcgaatcagacaatgtcagtggatccaaaattactagtggacaatgtagccagaccaccggtggctcaagttcctgacggtttactccgtagaaaatacatactaactagtactagagggtcgtatacgaatacgatgaggtctctcatttagcacattggtagccaccaattttataacaatgttataccaggtgagatcagagattgagcgggaagataagacgtcatgacgcgcaaatgaggatacgttaccattctgatcatcctttcctggtgatcaggggtgatagtacggagtagaatacactaagcaagctagaaaaaaaaatcatagtaaaaggggggagcggatatgatttgacacagttataccaagctcacaaatggtccatgcatatggaggttcctttatttctgaaacgtgtgtgatccggccagacgatgatgatggggcctctgccaatacgaggctgtgcaatcgcgtgaacattaatgtcagttgattggcatactgtgtcgatccttataccatgtgtatgcaacctgttgatgtttattttttttccttttatgttatatatcttctcaaacagaatagaaaagttgccattgaaaatgttctggatctatgaagggtaaaatagtctaatgatcttcccgcttctagaaccctggggtacactaagaagaatactagtaatgtctacaacatacgatgtgcatactccgaacatagctctaactagctttataccagtgctcaggagagtttaccgctggatctaaaaccattagaaatataaaaaggaaggtaaagatatcagccaaggactcttggctttccattttcgtgtttctctcttgccacttttgtgctcattgagttcaacaggtccaaaagaggatgatactctacttctgcaggtagttgcatacctaggtattttcccttctcgatgattaaatcaaatccctaatgcttgccgattgatgtgcaatatattgctccaggcatgaagaaattgatcgatttaggccggatgttgatctttcattatatgaaccactggcgttgctctcaaagtgctagacagttcttaggagacacaagtgcctatactatatagtctgatggatgtgtgcctccaaggttctaatcacgtgggaactccagactgaaatttacaggctaattttgttgtagaagcgctttcataaaagcggcagctaagggccccacccgacagaagaaattcacttcaaggacatgctccttcggacggagtaggcagcgacttataagtgtggacctatgttgtagaaatctaaaatctaattttgttttatttgattaactatgaaggcagacaaaatactaaaacaatgtgatatacctgagtacataaagctattcaaagttaccagttgtacgtaacggtccactgtattcggcacactccacagctgggggcaacagttcccttggtccagtgtgaatacttaatattggcagattcgacttctgctaattataatcgcaaggcccatggacccgcttgattcccgccatccatcaaccgcttccggcgtaagtacacgtatatgttaaaaagagaaagagggttttctttggtcaagaagaagaggggaaagttaatagagtgactacaggaaaacaaaagggaagaaagaaaatagagcaagtgaaacatatataggcttggtggcattctgtagagagttgaaggggggaaaagtgccaatgggtagtcatacggaacaaaccaaaaacatcaatacagtaaaataccagtgatgtgattggtttccagatagccgcccctgttttcttacaatacagtaccacataccttcgcagtggaatggcgactccaggcagtgtctttcccacggacccttgacttgtccctgagttgaacaacccgtggactctccttcttccaaccctcccgtctctcttttcttttctttctcttctcttcttgatcgaaagggaacccttcgtgtgttcgcttcaatcttctccccccgatttcgagcctattactcctttactcctttttttggccatactgcgtatcgccagtccactcactctcgacatttcgccttttcgttttacgcgctcaacctcgctctcattcaggctctgacgtactctcatttatctatctcagcttctttccattccataaacctccttacgactacttctacgctccgcctatactcaatgccccagtgaaaggcaagacaccttgactcaatcttgactactctactcccgacaatttccgccgaacatacaatatagtaacagtccaaggagacattgagaaataattcggcccggcgatcacacaatattcggccgtacaaaaacttccgcatccggcggctggcaacgtggtactctggagtcccactgacacggtagccgacagatctcttcccctcgtccactgggaacctttccagtgcttcgcaacctcttcctgatatcaaacatacaccaacatgcggttaatatcgcttctcacctgcttcgtcgcctttctggcgccgctagcctccgccgttaaactccttgaatccaatgccctcaccgtgtgtatggaaagtagcaacttcacggcaacatatttcagcgtcactttctaccccggtaacaactctcttatggtcgggttcgatggcgtctcatacatcgagggcaaggttgttgcggagatgacccttaccgcatatggctacgaggcatacaagaacacccttaatccttgttcgattgctggcatgggtatgtgccccatgtccgctggacccatggatttggggccgctttctctggacctgccagaaggcacttcggacaagattcctggtattgcctacaccgtgcctgatcttgacgcaaatgtgcggattgtcatcaagacactcgagactaatgaaaagattgcctgtgtcgaggcctcgctttccaacggcaagaccgttaatcaagccggagtctcgtggacaactgccgtgatctccggactaggtctcgctgcatccgccattacctccggactaggtcattccaacactgcggctcatgtcgcggcaaatgcactctctcttttcggatttatgcagtcgcaagcgatgattggcatgacctccgttcatatgcctccgatcgtggaagcttggacccagaacttccaatggagcatgggtatcatccgcgtaggattcatccagaaaatcgctacctggtatcagcgggcaactggtggaactccatcgacaattatgtcgcagcttgaggatacttctgtggaagtcctcaagcgccggaagcgtgacttggttgacccagcaatgaacctcttgaagagagccacgggaccaatcatcaagcgggcaactggtatggtaaagagagccgaaggaggccagaaacttcttgtcattcgaggaattgagcgtgttggattccgtgcgcacatcgagcagaccaacattttcctcactggcctgattttctttgcggtcttcacttgcattgttatcattatcgttacagccttcaagggaattactgagttacttgtcaaacatggcaaaatgaagagcgagcggttccaggacttccgcaatggatggaaggtagttctgcgtggtatcttgttccgactgactctcatcggtttaccccaaatgtccgttctttgcctctgggagttcacccagcgtgactcacccgccgaggttgttttggcagcggtcatgatcctttctatgctcgtatctcttggttgggcctctcagaaggttattcggttggcaaagcgttcagtcaccatgcacaagaacccggcatacattctctactctgatccatcctgtctgaacaagtggggcttcttgtatgtgcaataccgagcaacggcatactatttcgtcgttccgttcctcatctacaccttgatcaagggcatgttcatcggtctgagccagcctgcaccggtcgttcagacagtggctttggtgatccttgagctagccatgctggttgctgtctgcattctccgtccttggatggataagaagaccaacgtcttcaacatctccattgctgcagtcaatttcctcaactccatcttcctgcttgtgttctcggatgtcttcgatccccccggaatgatgatcggtgtcatgggtgtcatcttcttcgtttacaatgccgtgtttgctttggtccttttgatcctggttctgatcgcctcagtttatgccgttgtgtccaagaaccccgatactcgttaccagcccatgcgcgacgatcgtggctcgttcatcaagtcccaaacccagctgacaactgaattggatgccttgggcgctacagcacgtggtgatgtcaagcctgggcaatataacaacaacccattcgacgatgatacggcttccatctccagtggaaatggtgctaccgtcggccgccaaatggaatcgacctacccaccgcatggctctgccgcccaagcgcctcggtcacccgttgacccatctgtaccactattccccagcaacgtgtctggtcatcacaatcctccccccggatacgaccagtttggtcggtccccttcacccgccggaaggagctttgataacaactctcctgttggtcaatctgctttggcgacacattatcgagcccagaacaacgccagtccttggcaacggggcgctggctatgaccattaaaaaaaatgccagtggtctattatattgtcgcttccgagatgaagatatgtgattttgttttagcgcgggataccgatggtctatgattttccattcgccattccctctgggtccggggttttcttttcctttcttgttttttattgcttctacacaagtctgcagcatcctcgtcgcttcagataaacttcttttcttaattcactccattggtcaatggtgtgagccttttttgtcatctatcccttcctttctctctacttcttacttatttttctttttcctctccctggtctaaattcttttgctgtgcgtctcccttgtttttatttccgcctggcgttctttgatgcattctggatatggtgattggccttgggggttctcttttcttgttggcttggcagtttgcctgctgccaattaaatatatttccaatttctcgtttcacctgggcaacatttctcttcctatgtatacaccagtgttctggatgtaatcttagtgtatatatatgaaagcagttcctgcaaatctatgccgatgtggaattttttttcttttttgcaatgtatcttttgtaaagaatccaattccatgaactgacaacaacctgccgaaatcgaccagaaccccagagaccatttcgtacgaaacacaacgtacgaaaagtaaagagacgtaaaaacaaaaagaaaccgctattttacactaacagtaaagagcaaaaagaaccatgagagatgccatgccatgcccacgacacacatccccacagaaatgaaaaggtatcagaaacaaaccatatacgaagcaaccccagatcgtaactatgatcaccaccgttgatccatcccaccaggaggcccaccaggaggtccacctccagggggaggaggatacccctccatgccacgggggccagtaggaatgggcgacggaccaccgggcgccataccgggctgagcaggcataggcgggaaacccggcgcgccaggcggaggaatagggaagttcgggaagccgcccgggggcggaatcggcaggtttgcgccctgaggcatgttagggaggggcggggggaagccgcctgttggcggggttccggcggcgttagggaaaggcggtgggaaggggagaccgtgagctcctggggctattggttggggataatggttagcttggtatggcccaccgtagcttggggatccttgtctctggttcttggacatggaggttgggtgggacatacgagggatcatgcctggggcgccgggggcgcctggtggagggatgccgaaggggggagggggcatgcctggtcgtcctggctgtgttagcttcgtcttttggttggtttcggtgagcatggaagagtcatacctgggaatccgaagggaggcgggaaagcgcccgggggcatcatgttgggggcttgttggccctctgcggcgtaggaggaggtaatggagtcgatgacggactgggccttttcttggccgatctctgtatggatgcatatggttagctatcgttcagctgttgggtttgacgtgtcttgcgccatcggtcagacgtacgttggtagtagtccaccacgttcctcaggtggtttcgaccggagttatgcgccttgcgcacgctcatcgagtcgtgcgtcaggtagacatcgcagtagtcgcctataggttgaagtgaggggttagcaatatgccgatgggtgtgggtatagcatcgtgtcgcattattgcccggaataggctatgacacggcttggtctgtctagacctggattttggtcaaaacctacagaagagtgcatgggaagttagctttcagttgcaaatgtatagaccggagggcacttatatttgggcatgttgcaggtttctgcagcaagtaccttgctgtcgtcgcgcgaaagaggaaaattccctttcgggataggtttcgttcaggaggcggggttcaagactagtgaggactgtcctgtcttgcaatctctttctttcaagccgactctcggaagtaatgccttggtgacgcaaatacgagagaaattgaagcagcaggaccggcaagttgtctcggagctcgatggcgagggttgagcaggcggtcggatgtggcagaatagtgtcttatcgcataccctttctaatacaaagacaacatctctcttgcaaaaaaggtgaactctcgtgatagaaataatgggtccaattccaacttactagtacaacccattccgccaattttacactagcacctaaactcgagagggagcggtatgcattcactcattactacctacatacacatcgcactctctgctactccggacatggtaatggacccccaagtctacgactgtgtctagataagctattaagtagcgtcatatgcaatcaatgtatggcacttctgctttctacggccatccacgaggccatacttgcgggacatacttgggccagactgatacaaagctttggagtcagttgtcaaagtgaaaagcattggaattctgttgaattgagtcaccacctagatcaatgttggattaaccccctggatcaatgttgaattaaccccctggatcaatgttgaattgattaaacccctggatcaatctcgatcaatgttccacccgagaatactagcttagaatgctgtcctcatgagagacggtttacatatcccacttgcttgcgacagccggggacaagacgccattgacaactccaccctgctttctcagattcaaaacctgcgtaccctccttatgctcaatctcaaaatttccgttctccccgccccgagcgaatgccatgatcatctggagtaaactggcgaacctgctcaaagccggttgctgcgcctcctcccactccttaacatcatcctgcacgttctggacccgaatattctggaattggccagctgtatggtgggcaagaatgaagttgggggtctgggtaagccacaaccggggcaattcttgccgaagggtgttgcggttccttttgctgcgagctcgagtctttaggtcaaagattgcgcattgtgggatacgttggccttgtctggcaatttcaagctgcttgagtgccgtttccgtagtggctgaggacacacccgaaatcgatatttcttcgatcgacagcaaagcttcccctgggtcggcgctttcgtcctgggtaacgggctgtccttcggttccctcggtatccgggaccaggtcgggcaagaagccatcagcttcaaaacgcaccaggcactgcatgccagcaaattcatactccatcactcgttgatgggactgggatccgcccacacctgcattccatgtggtgtacgcttccgggaaagtatgtccgtacccgttgttgggataaatttcggtgggcgagttttcccttctgataaagaagaccgtgctgccaagtacctcgacaagcatcctgaagggcctatcctgcccaagtacaaaacccagcagattgcccaatgtattgttgcacccgacgatgtccacactggtcagagggaactcgggtttatctgtcaggattgctttcaccattggctccatggggtgggcgggatatttcgccgcatttcgatcgcggtaatattcagcactgtcttgacgaagtgtagggccatcgggcagaggtgtccacttgggtggttcacctggtataaatatgtcagagaatatacttgcgaccgatgatcatgggaccttacctggaacgataattctgctcttttccccaccaagccagttgtaggaagtcaaatactggctgttcttgatgcgagatgcggtatcatcttcgtcgggaccaagaccttcaatttcatcgtattggattgtgacaatgacatttcctagcggaggtgctggccatctgctcacaggcgcgcgccatctgcctgtacctcgtcccctccacagcccttgtcctcgttttccgggcaaaggcatggcgtagagtttaacccgcttggtagcgaggacgaaagaacgcacgtagccgagacgctaatgcagtaatgtatctgtcgataggcgaaagaaagaggaaagtaatatttacggaccgatctatttaactatttcgtttgtcgttacgcgcataaaatcattacggcttatgcgcataggttgcgcagccgcgatatctattcctggtggatgatgcgtttgttgaattcgctgtcaaagccacggtgatgcgtttgaagacccctgcaacaaggcagcgagccctaatggttatgtttagtgtagcagtgctctgcttgttggcaagaggagtccaaactatacaaggacactttgactaattccaagcctacaaaaagaattcgtagttaatgctgcatctatcttgggatatctggaatttgatgaacttgggtactttgaagtttcgagcatactaaaggatgaaatggcatgattaaggtcactaagcgtgtaggaagaccactcaaataccacctttacgcacgatggatgaggtactgagacgcttgagtgtattctgctcttcttctcgctcatggctgcgacatctggaaactggatctaaaaatgcgggaggaggaagacagtacttggaggaaagccctacttacggcagtgtatggtcacccagcacgccatatcgtattttgccagcataacatttcgtaaatatagtatttgcatgttttattgactgtacaaactgagatattgtagaaattgaacctgtagaagttaatattttaagaattaatcactagaatatgtacatatgtaggtaacagattggcggcatgacagtcaaaatttgatatggaaaacacgatatggcgcactgccggctatccgctgctgtactctgagtgagcaggcagaatctttgagcgtcagcatattcgttgccaacaattgcaaaaaccgactgagcattatgcggagggagaaaatccgagcaagcttgatatcgaagcaaatcatttgctgtaccagcacagctgcagcaatgtactatgaggatactcgatatgcttcccgggcaccgtgcttcaagaagaagtgggcgagattcttgagtccgcgtgtctacgacaatgacgcccaaaattagacattggtaggagatcatcggcaggtccggccaaacatccacagctccagcttgagaatagagaaaggagagggttataacgtaaacgtctccctttttgaaagatcatatgccggatttcggcacacggcactgatcaagcactatatgatgtcctgggatttcaagtcttatacgtaatcctacctatcccgggctagaagatgccgagaagactaagaaccgcccttagccacaaaggctctgtggcagagtgatattttctatcgtcaaaattatgaagatatctttggcgaggtctctggctaacatgataagaacttaaaggggagtaagaggaatgtctttgaggcagagattgtcctcagaatcgtgagtcgtgttgacacttttagtcgctgagtctattgcggcagcctctaagcaaacagaatgattcagtcctaagatccataggaatctgtgtccagggctgtcaatggattaaacaaatgtgctggtggtttccaaggggcgttaaatgctcagcttgaaattccctgagattgggatactgtattgagaatattggaatgtagttagcatcagataaactaggtatatcactgtggaaattcaggtagtgtttgtatgcacttttcttgtgaggcaacctcatcactgttcaagtttgctttaggtgaaaagatagtgagattagccatatgagtccaaaggaagtgcatcgtgacaaacatttccatcgcggtcaacgcttgcacatcctgtcgctttaccttcgctctcatgccatccatctgaattagtccccgagtcaagtccctcgattcaaaatggcgaccaccatacccacaacggaaatcaacaagctcgccgccggggccaagatcctcatgttgggaaccgagatgcttgtctttctcagcgccggcgacctcatggcaagcccaatcaccccatccggaacccctcaaatctcagtgccactcaacgaactcccagaccacctttcgaccagaaccttcgtcttcgaagacccaaaggccctcgaagcatacttctgcaacacagtatcagcccgtccgaaagccaccaaatttcgactcgtccccatgcatcagttcataaacaacccactcccaacgctgagcatggacggatcatccggtgaaggatggactcgtcattcccccgaccagccgcccgaggtacgcgagttcttcaaggcgatgccgtttccatacccaagtcttgaattcgtctccatcgaccaaattacctaccccgagggacgggagttcagtacgctcaattcagattggagggcagcttgtcgggctgttccgaaggggcacaaggtggaagagatcacgtttgatctggccggatcaatgaagctcaattcaagttatgtctctcgtttggtgcagctggtgagcactattcttgctgtcaaggctgcgggtccattccgctgccgacttcgtgatgatgagccctaccagtacaaggatcgtgtgacgggtgctttggccaacaatggggtttctggttagcaggacgagactcgacatgataccccgtattgcgtatccggatttggcgaggcgggtgatatgtctggctgcgaaggactcaagaacagggctgggaattgggaactaggctgttctctggtattgggatgtctttccaaggggcatctccacatgattgttggagcctggtggagtgaacatggaaggatgggaatctggtgacatgaatgatgaatgtcgtgtcttggcatcatttgagattcgaaatggactttttccgaaaccattgtgctatggtagtgttacagtctcaattatccaatgtatcacgaatccacaaacaagcattttagacatgtctgtcaaccaggttcagaagtcttgtttttctgtgttccatgaaaggtgtttcagatttatacaactacaacaatgagagacatggattagtaaccttggaagacaaccgatccccaaggtcctaatcccaaccccaacaccacgtacatacatgaatgtaccaagccagccaagattccaacccaacgagctgatagcctccgaacccggcaatatcagacgtaacacaacccgatcgggatatagaaatatgttgaaggtcacatcgaccagcacagagctacaacatagctaaaacggtaaattggcaagatccatggatgacacgaattactcaataagaacagcacccaaagcctaaatgcgagaaccggtactatcggataagcagggaagtgctggcattcaatccttgaacgccaacgtatgtcggtaatactacctaggtgcctgggtagtcatgtccggctaggagccgccagcctaaccggttgccgggcctcgacctggcgacaatgataatcatgtgtcatggcgctgcgctattatctaatggcacatagcggggtgtatttttgtttgtacggagtacggagtagatggaacaagctagctaagtacgtatatggatattggatatgtaagacggagtatccggggtttgtttaatcgcgcatttttatatagttgtgtttgatatgtgagggggaacagaatgatgtacgtctgaagaatctcctagtcaggtgctaagcctcgtccaattgggagatcgggatgtgatttttcgacctgacagtattagccgtgtcagtctcagcagacacgtatcctcaacacgtgaggtcacggcattcctacactttacccctatcgagtaaaaaggggaaaggccggacgcacctcacagcgaaaaagttggggaaaagaaaatctggggaaatggaaaacgcacagacacatccatggcatccatggatggcaaggtgatttgtctgttttcgccgctcggatctctcggccagtcagagcacatgagcgaccagagattttttttttttttttttttgcccttttttccttttcggttttatttttcaacgtcattcagcatctggggaacacttgacacttggcctgttctcggactcctcggcactgaatcacaaaggggtcaacctagacatcattctcggcagtctaggcattgcccaggtggtactcctacggtgagtgaattatttgatcaagacaggtaccatgtgcagcgaactagccctagacttggatcgacgcgggctaaggaagaatatcccgcagatttcagcgcgatggggtcatcgtacattagcgcgtcctgaaatttcagtacatacaacacatatattttatcgatctgatattgttattcatccccaaatgtagccctggagtatacatatccatagatatacttatacagttgcattatataccagtttgtacaacacacacattcatggatgtagccatcagtttgacatcactggtacttatgaattgcaaaaatgtgttgcacaaatagcccctgttctctggaaatagaaagtggacacgggccggtgaatgggccggtgaatgatgcaattgctattgctggagcagtaaaataccttttctcttggtattctggtattgataatacatcgtgagtattttatttctattgcctcaagactacggagtacaacatactcaatactactgcctaaattgcgcaacacctgacgtgattgagacatggcccctgttgcggtgtgtgctgacaagggataataacgtgcccaggtgcccagccctggaggtgcccaggtgagtgtcaaaattgtattgggatctggacactcgatgatcctgaaaatgcgtggtttttctgcatttcctgggggtaatggaaatccccattggttgggaagggagtttctgttacgtcttgccactcactattggtggagtagccccagtcagatgacttggttgcccagtggacaatttgtaaaagcggcaagagttgtatcgtgtggggaagagccaaggccaatcacattccttaaccagatcacaggggtttttcaggacacatgcaggtgctgacatagcatccaaaatggaaatatctcttgctggtacaccgatgacgatggggaaaaagggataaattcaaaattcccataaaaaataaaataaaataaaatcaaaaatcaaaaatcaaaaagaaaaaccccacagcaccttgtgactggatgtcgtgcctggatctgggaatgactccaaaaaaggtcccagggactatataactggaagtccccgctgtttgcttaagacccataactgcaaattcttcaactggatggagtctttatagtctttacagcatagactgttttatctatactttatacttcagatctactttgaatcacatatcaacatgtctacatcaaattatcgccttgttgagccacacccttcagtgccaaacgccggccgtccagccgtctacactggccgtggaggatgcgggaatatcgtcaatctcaagaacaccaagaccaccgactcgcgcagcgcaaccggtcccgcgtctttagcccgtctcgactctcgcgtcccaacagccttcatctccggccgcggcggagccggcaacgtccacagcagcagcgagcgtgccatcttcagcttcgatgaagaactcgaacgtgatctgcgccaggccgcccccgtctaccacgtcggccgtggtggcgccggcaacaccatgtaccgcgacgactacagcacatccagtctgagtcgcaagtactccgccgccagcacggccaccaactccagcagtggctccgtggctgatcgtgcgcgggatatggcccgtcgtgggctggagaagggttggggcaagctgaagggtactgcctagatgcatattctctacacttccgtttccactgccgatatcaacatcaacgacataacgaccaaaaaagtttcttgcctttcttcaccacttctcatttttaatcagggacttcaccgatcccagaccgaaacatcgacatcccgttgataataatccgttgaggagtgtcttgccacaagacccctttctacctgtcatgtttctctctgcatgtgtcggcgaagtcccaaccactcatacgtcttccccaacatttctttatttcatcgaaacctcctcactcaatcatgggcaaactggcgtttcattatgtctttttgtggttaatttgcgcctcgagccaaagggccaaaccaccctgcatcaacgccaggttctggaaactgggttctcttctctacggagtttcattcaacaccaagatcgcgccatcgaacaacaattgtctggctgcatcattctcggagtccgcccttattttctcatctctcacttttctgtgtttccttgtgtctgtttttcaacatattcccccaatattgcgccactctgagctactactttctagccatgagtttaacaatgaattgcatgcttgggtttccccgggctggattacatgtcttcaatattttctattacatcattgtagttgtagatttggttaagaagttctcgttgtgactggttccactcatggcgaatctgggcttgacagatgtcgcatccagttgtagcgttgtagccgcggataggcgatgacagccggaatatggcattctggttggcccatggatgtcagaagaaacaggtattcttcgttcattctctggaatattctactgtctttgttataatcatgttctttgttcttttggtccatggatgttcttaagttcgatttgccattctattttctttgaactcggtgttcggtattggggctaagttgatgtgtggcgacatgtatacttgatttcttttaatctctatatcaaggccagcattgacagaaacgagattttcattcattaaagaaattgcctccgttacccagtgagccccatccatctgaatttgggtatgttgggctcccaactattcatagatgggaggcgaattggagaatgaacaaacacgtcttcattatcattgtctctttggtttagaggtagatcgaataagataagtgtaactgtacactcagatatttctaaataaattgcatatgtagcctcgcgcgacactgcctattgtgattcagccaagctacgcagatgagagagaatataatatgacaagaacttgtgtatgcaggtatgtccgagtaaattatgtctagagtagaaccatccccaagacgcaagagactgtatttgcaataaagtcggagcggatgccaagagaacatgagctggataggaaatggaaactggggtatcaagagccggggacccgactcggatttgtgatggtcgatcacttgttggtatgcactgccaattgcataatgatcgatccaggttgacaagatctgtttcttgtatttgttctggggattggagatggtgccttggggatcgcgttcgacgcagtggatgctattggtcccagagtgactcggcagaaggccaccatgatatcaaagactttcgtcacaagcgagtcctttatgcgaatcgcttgtgaatcacctcgggatcctcgtgccattcgtctgcacttacccacatctagagtcatttagttagctgtaatgcattggcatcacgggggtgttgcatacctttctaaaggtgctcagcccagcaagaatgctaccaccaatccacgtggtgtacttgcgctcagcaggcgcagaaatgcggatcttcatgtcctcgactgctagttttttgatctcacgcatcaatcgatcagggaagttcttgcacagtgttgaacctccagaaagcacaatattcaggtacagcgattttcgcaggtcgagatctgtgcgggtgatggcgtcctgcacgatctggtgtacaccgggatactcgaggccgatgagctcgggatcgaagaggatctcaggcgcacggtaacgttcttggccgatcttgagaggtgagttcattagcattgttgtaatccaggaatgatattccaagacattgcataccttgatcttgtgaccgtccggaagagcgtagtccatcgctttagcatcagacttgtggtagctattcatccactccttctcttcccgctttggatccagcgacacatagcagaccttctccttaatcatccgcaccacctccttctcggcgctagtgtgcagcacatgtccagccttccgcagcagcaactgcatctgctccgtaacatcacgaccagcaacatcaattctccgaatactgttgggaatagcgaaaccctcgaagaccggcactgcgtgggagacaccgtcaccagagtccaagaccacacccgtggtccggccagacgcatagagcgacaacacggcctgaatcgacatgtacaaggccggaacgttgaaagcctcgaacatgagttgggctgcgatatcacggttggcgcgcgggttcagcggtggctccgtgaggaggacggggtgttcttcggggagggtcttgagctcgttttcgtagacgtagtgccaaatggattccatatcttcccaattcgtgacaatgccgtgttccagaggatatctgatcttcaatagtccgcggagttcttgtgcacgggacccgatgaacgagtccccttccagaccaccagccattacgcgcgggtgcttgggacgaccgacaaacgacgggaaataacatgatggaatctcctctccggcaaagcctgctcggattgtcccgcttccattgtcgatgacaattggcacgttgtgaagagttgcctctgccattgcggggggtgtggatgggaggttgaggtcggataaggacaagcgcgggtatagacggcctctcggcctagaatgggcgactcggagaaatagcggggtgggagttgaactgaaggcgcatataatgtgttcggtggttgggcgttgatgttcttgttgattcaggagtggacgcgaagccgcaaatccgcaaatcgggaattgtcaacaaggagcttgggccactcttagtccacgcctggtaaattgaacccacaatagaattgaagtctacagaattatcagaatatatctgattagttcattgtataataagaaacatatctcaaatagttgtgttaaaatctaatcggtagtggttcggatgagcttagaaagtaaattgattctcttcatgggtctatcagacgttatctcgacactcaatagaccgaacagactgaactcggaccaatcgcttcacggatgcccatttgatttcatgaaacgtcataactcgtgatataatgcagcccccaagcccattgttcagtggacaaaagtggatgggtgggaatcagtcctcgtaggacaccagaggggttcctttagtccaaaaagcccaactcgtcagacatactttccgcaagagttgtatttccagttcgcatagacaatacctcggccttctgagtctctgctctgctaatagcattgcccacatcactgatcagaggttagctagactggccgaatagacaaaggaggatagatcatttacttgaccgaactactaatcacgtagttccctgcttctagctcatctgccagttcctgctggtgattatcggcaaggtctggattggggactacaatcaagggtacacccagacgaagtcctgccagaacagtcccagttcctatgagatggtaagtgaatcaaggcctgacatattcaatacgcgagatagtgatgcatcataccggcatgacaaatgatcaagccacgctcttgattaagcgcctctctttccacggtcatcatcatttgcgcatcaatgctcggctggaaatcgaatcctccaagggtgagaccgtggtggggctggtcactgtcgatgaagttctggaaaatttgctggccatctttaccgtactgaataagaagatgggtgtagccacgcttggataacgtctcgagaaattgagaactaagtatttgttcaagtagtttctggaaggaagccgtggcccccacagtcacaaagcatagcttcatcgtggcgatgttgtgtcgaagtgggcagagaaatcaaccttggaaggttctctcacaatcaattatcgtccctcacataggggaatcgtaaaaagatgcattatcgagatgaaagaatagtccaaagatcaagatgcaatcatataccatggcgtcacgtgtatatgacccacgctagtctgaatatggcatagcgtatggcggtgaacctcgcaaaagtggaagcggaaaacatcgtagttgagatcttgtccctacccacgctataccctcgacaatggcctcagcagctcggttattgactcgcccagccggcaatttggcccggaggggcctcatggccccctctgcccggtacttctcagcctcgccgctcaatcgcgtccaggatgaccccgtgattcctcctccgccgaaggaactcagaccggaggatttccccccaatgcctgagtactcagtcgatctcctgaccaaggagcagcggtcaatgtacgatatgatgtctcccgaggagcgcgcggcattcgacgaagagaacacccgcatggttgccgaattcaacgatcccaggaagcgcgctgcggcctttgaggaactcgagcagagcattttgaagattgataaagaggaggatctccgattcgaagaaatccgcccccgtcggcctggtttctgggctgaagacgagccagacgagttggtgaacatactcgaggatggagacgaggaaatcaatgacgacgaaatcacctccatggcacacgcagagatggaattgcaccgtgaaatgagagaatatgcccgcattacagcatgggacatgccaatgctgagcagtaagatcaattgctcactacgaccataccttccatctactgacattgaactattagagctcgccaaaccattcaccctgcctccccaaacccacatcctccgcttccgctacactacttacatgggtgaacagcacccggccgagcccaaggtcgtcgtggaactcgcatcccaagatctgacccccaagtatctcaccgaagcccagcgccaaacattcctcaaactggccggtacgcgctacaacccgcagaccgatattatccgcatgtcgagtgagaagttcggctcgcgtgcccaaaacaagcgctacctggcagatgtggtcaactccatgatcaaggaggccaaggaaggtgactcctttgccgatatcccgctcgacctccgccaccacaagcaaaagaccagactgcaattccccgaatcctggaacatgaccgaggcccgtcggaatcagctggctgcgcggcgcagggagcgtctagcagccgaggagacgcgagcggcccttgtggacggtaattcaattgtctccgatgctatcaaggctctgccttcgctcaaccctgctctccaggccaaggctgctgatgagcgggagcgcgttgctgtcaaggttggcgctcggaaaaaggtcgcccgccggtaatagatgttcgtcaactgtatattgggtgtgtttgagaagctgttgtcagacatttgcgaggcgcgggcgcatatttcaggatttttggcatcttttctttcgaatgtactatagtcattctattccatgcattggcggctcgctgttactccattccttgtagtttgcctctcgacttagcaccgtgaagtatgttattttctagagagctctatttcaacgctccctagtatctagatgctactggagaattggaaacggtagtataaaaagaaaaagtgaaaagaaatcaacgcatcaaattggtgtgagatatctgccaagacaaggaagtcggtcagcagaaccaaccacaacctcgtcaacagccaacttccgactcatctatactcgaaccaacaagaaaacctaggtatcctgtccatgacagataggacaaggccttgttgcagttccagaatcgaaaataaagacaatcacaaacgaaataacaactccatatgggtacagattccacccgtgttaattaacgggcaacaacttcccaatcaagaaaaacaaaaaataacgcaaaagaaacaaaaaataaagaaacgacaaagaataaacgcgtcgcaagaaaagaaaaaatgtccatgactgccatgcgatctctcacgtctgatgattgtcgtcttgtctgggccacttttcgtgcttgggtatagtctctgtgtatgatatcgcataattttacctggtaggttgacatcgaagggaaaaccacgacgatgcaccagatctcataagtgcacgaaaaaaggatggaatcgatcaacgagcggaaccatgcaaatagtcacgttgaccaccgcaggtcaagcccgcctgagtgaaagtgtcgaagcaatcatatcagttgccgtgttgattgtttgagtacggtccaaacaagtgggcaatgtgctcagcaggtggcgatgtgcgcttgagaataggacctccaatgggaccccaagtgacacgggtgtcggctgagttcaaaggcacgttttcagtgacctggagatctccgatccggggagtagaaggtccataattcatctggacggtagcgtgggagccgctggactctgacaccttgcgagaaggcatatcgacacgggtgaatgcgccgaagttcgaatcgtaggctacagcgggttccctcgggagcatgacaccgccatcagaagaagggttcgaactgtgctggtagatggcgtggggctgcacatggtgatgggcgtcgaccggcttgttcgaggcatcctcgaacatatcttcattacactcggtcagctcattgagcttccaataggcatttctgtggaagttaccatcatccagaagagattgatgcgcagccatgggagcagaaacatgaccaatagccgagacggtgattggaactgaggccggaacagcggccgggggagtcggggtgcagacttggttgccgccaaatccgtgagacccatattcgtaggtggctggggcggattccatgccgggggaccactcactgctccgctcgctgtcactgctaatcccttgacgaatagaagccatgtttcggttacggccaccacggtgggtacccttccaggtattgccatgatgtccatgcgcggccccggtgcgtccacctcgatgctggttgtagctgccgaagctgctgtgacctccacggttcgctggtccgcgaggaggggacttgtccagctttgagttagcatgggtggtgggcattttgctggcaccgccctcgttggtaggcgaagctggggatggcagggcccgcatgggcggctgatccgcaatggcaagttgcggacggttttggttggggtgcaagagactcttcacattgtgcttctcccggtaccaacgagggatatcccgaaggccaagtttctcgatcaagtgcttctcatcgggcatttcatgcttgtacaggcaacctatgcaacacggcgtcagtcaatgcttcataggtctcagccattcagtcaacttaccttgctgagaatagtcacattcaccgtgacgaatccagtacgaacagtactctttcttcgaacttggggcctgcgttgaaagggttagaaacttgcactataccatgccaggagactcagccatacatgcttattgccatgatgtcctttggcataaaagcttggtgcggtcggagagagtccattggtaggagtgccttgaccggcaagcctgttagagccctcgactccctggaagaggatggcctgcgcggatgcccgcatgtgatcaggaacgtttttgttcgtgaggacctgcagcaggaggctgtgcatatccggaacagattccttcttgtcaccgtcacgctcagaggaccgggtaaccccgtcaacagaccaaggctcaggacgtcggttagctagaccacagctagtcataccctgggtctctccagcattgagggtgcgagagacaccacggatggtgacgttagtgggtagctcatcgacagctaccagtggggtcaaggtcccatcagggcgggtacagaaaaattgagggcgacccggagtcgccatcttgacaataagcaaaaacttgatcaagataaaaatgagagattgaatggataagattgtgcaataagaatgtggtgcagaaagaagcaagagagatgaagaaaagaagtgggaagaggacgtttgtgggagaagagtgttatgggaggcgacaagagacagaaggggcaggtgacaggtgacaggggacagccctagaggtgacagccctggaggtgacagccctgaaggtgacagccctgaaggtgacagccctgaaggtgacagccctgaagacaaacaagacaacagcaaattgggacgaggatgagatgagaaactgaagttagggaaacacaatctcatatattggagagcctttgagattcatgaagcttgaccgtgctaattatctacatatcaaagggatatatgagtttaatccatacaatgaacttgaccatcttgggtatattagatacactgggtgcacaatggggtctatctatccttaagctcacaatacgatccccatggagacaaagacaccctggtctatcagatcaggaaacgagtgtacagtgttgcagatgatatggatacatcgtttctctgcatatcaaagagcagaaagcctgtaggaatagactactgaaaggcacgaataagctgtgtaccattcagagtcaatgcttttggcttgtaaatgcatatgaacgtgtgccttggcaggattgagcggctgtctgcaggacatgcttagtccgattctaaatttgaccttctatcatgtttctacgtattccttgcctttcatgtgctgatatcaatgctatgcatgtttaaggctatgaaatagtcattgtccattgccccgtgttcacaggtagaggataggacaagaaggatctaccactataaagtctgaggcttactctgtctgtctcctgacctattgctggtagtgagtaatcttgtctcctaaggatacttcttcgacctggtgcgactcctaccccatgccaactgtatcacctctagatatagacatctttcttttgatatcctaggagtaactgccagccatttctctttctaaggaggacttgcattgcttgctcgaaaataagacaaagtgcgactgccaccacgacctatccagcctggaaatagcccatacagacgaacattatcagggccccaaagaaaacaaaaacaaaaacttggtcatagacaaaaagaaagaagagcaaaaacaaaaacaaaaaaaaaagggaaacataacgatatcgcctagtacttgttctccttcctgtcgcgttggatgtcgttgatagctggcaatgcggctcggctcaagtcaagaccccgtgacttagcttgacctaactcgaccgctccaggaatacaaaaccccaaagttgagacaccttgctaactagaagactccaccaagtctagcatagatcccaaacagggacaccttccataggcaaaaacaaatggaacgacaaatttcctcaactgtgattctgcctggcccatcgtatatgccattcctatagctcatcctaggaatttgacagctggtcctcttgcttgagccggtcctcttgcttgagccggtcctcttgcttgagccggtcctcttgcttgagccggtcctcttgcttgagccggtcctcttgcttgagccggtcctcttgcttgacccggtcctcttgcttgacttgatcgtctgatttctgtattagctgattgtctttcattttacgttccctttcttgtattctcggcttggttttgcctgcgttcttccggcgccgttctcgttgtctcgcgttgactctgtctgcgttcttccggtgccattctcgtttgctcgcgctgactctgtctgcgttcttccggcgccattcttggatgctcgcgctgattctgtctgcgttcttcctctgatactctcgattcctcgccttgattctgtctgcgttctccctctgatactctcgattcctcgccttgattctgtctgcgttctccctctgatattctcgattcctcgccttgattctgtctgcgttctccctctgatattctcgattattcgccttgattctgtctgcgttctccctataatattctcgattattcgccttgattttgtctgcgttcttccggcgccattctcgttttctcgccttgattttgtctgcgttcttccggcgccattctcggagtctcgccttgattctgtctgcgttcttcctctcatattctcgtcgtttcgccctgattttgtctgcgttcttcctctgatattttcgatttttcgccttgattttgcctgcgttcttccgatagtatcgtcgagagtacgagtcttctctgtctgtattctgcaagttcaattgcacgcatggcgcactagacctgacagatggtcgatgaacttccccagaaacattctggtatgcatcgtagaacctcttcttttcttcagaggcctcacccaccattaaggcgttgtccactttacgcttcagctgtaacaggtctcttgtcagataatatgggagctagcaccaagttagatgggctgtggatgttgaggctagtttctgcttactgtctcgcatccagaatgcttcagcaggcattggtcacagttggtggaacttccatgggcaatttggcaatcaactagcctttcgccggactccagttgcttttcccattgcttgaagcatacgaggcagagctggccttgtggttttgtgtccgaagactcaggggagctcggagtacgtgtctctttcaaaagatcctgggaatcaaagggggtgagactgcacttagagtcagagtggtcaaaactggctgtcagctcattcgggtcgatcttgaggggcagtggcatctccgtatcctcgtaagatggttcttgcttggtacgagcagcggcattccgttcaggatcaggcttctcatccttgatcgatagctctgctggttcgattgcaggggccaatggcatatcagagtcctcacgggatggtttctggtcgacaacagtagctgccttctgatcttcaggaatagctgccaaatcacgatcaggtttctcaactttgatcaatggccccgttgggttgattgtaggggccagcggcatctcggtatcctcgcaagatggatcttccttgacaccaatagctgccttctgatcttcaagatcagctgccaaatcagggtcagacttctcaaccttggtgggtggatcagttggatcgattttgggggccaagggcatgtcgatatcctcggagcatggtttctggtcgactccggtagctgtcttctggtcttctagaccaggtgccaaatcaaggtcaggtttgtcagtcttgatgaacgactcttttgctacatacgatatagctgttaatgtgtccacctttcataggggcaatagctcttctacagttttgcagactaaccttgttcatcatcatcatcatctggcatcttgactagagcatctgcagtccgaggctgaaggatgcttttcgagatgtcggactcctcaaactcctgtgtggtcttggacatcacctgcggtgtagcagtgggatcttgcttcatctccgcgaacacgtgctcaaggcggtgcattcgctgatgatgttctttgggcggatccatgtaacctgggttgatgaagttgtgtgaacgataaagggagtggggatatgtggagaagtgaagaaagatgcccgtatgcgcatctttgtttctttaaatattgctttgttgctagccatgtcaccactaacaatcctcctggattgcatagtgaggttcttgtagctggaagattgtgtagcagtgtcttccagggcagacgtttgcctgaattggattgctttctggccgcgcactacctgcatcttggatactacataatactgcatacatgcatggtcgaaaaagtgtttgctcaacaagcccatagaaaatgaacctgaagaactaaaagctatgtatacccctagatccctctactcttctggtatctcatcacatcgtctgtatcaagatgatagttgcaatatcgtaatcatacaacttcgggttcattctctaacaaaaagctgggtatctttcgctcgcaatgcccagaacgcccccgttctttccctttttctctttcttgaagacgaaagactgaactcctcccatgcaatgtacacagacataaaaagaaaaggcaaaatgaaaaatgaaaatgagagagacacaaagagaggagccggtgctcatctctgacgatgtcgcttcgaaaagatccccctactagggccacagcagcagaaattcgaggtgagtcttaagacccggcggactctgtcagatcaatgaaagtggcatggctcaccccgccaactgaaggtgagttgagccgaatctgaggttccgcctgggcggaatgcaaagccttcttccgcttctcctgagcggttcgcgcaaccgatttgagaataccctggaggtatctcttcgcttctaaaaccagggcggggtcctccgcgctcttctccagcgcttccataattcgggcaacctgcagccgtgactgcaggtggggacaggcccggcggcctccccagtgcgccaaaccgcacagaccacagaactcgacgccggcgagacggagtggacaacgcccagggacgtggcgttgttggcaggccacacaagatgggaaaccatcttgggcaccatcggtgcccatcggtgccgctgggggcggggagtcaacgcggcggaacgcgcgggctgtcgcagaattatgtatgttaaccaaaaatgtgctgttataggcacggaataaaaaacgatagggtagaacttaaaagcaaaaagaaaaagcagtaactaggatgtgaatggaaactcaattagttctcacctccctctacaccgacagtggtagggccagctgcaacacctgcagcggccggctgctcaccccccatctccccctctgcctcacccccatcgtagacagtgcccattggcaccactcctgcctcagaccccgagtcagtctcctcaccagcatctggctcttggaattcgtagtcgttgtcggcagcggcctttcgcatcttgctaggtccaggccggtcgggactagggatctcgtcgtcgtcgagtccctcgacgacggtgtttccgtagcggggcgcaccgcgctttctcttaccacgcccgagaccttcagcttgtcggttagcctcttctagcgcttcacgctcgcgctcctgaagaatcttctcccacgccgtgacatccacgggggtatcctcgacttcttcgacttcttcaaggctacctcggtccttttgccacacgcgggcgaaattgaagagcgcctgctcattctggttcgaactgccctcgctggccacttgctcggcctgttcagcctggctacggtccaacagcttgtcaatagagtggaaatcgtaactgatgtcagccgagtcgtcatcattgaacagtgcctgggcaccatgtttgaggatcgattccagatcttcttcgtcttgatcggcctcgatacgatcgatgagtacgtggtcaagagccatcttcgatttacctttctgcattattttttcctccactgacgcgcgcactaccaggtggaaaacaaggaccgtattcttctgcccgatccgatgggcacgcgacagagcctgcatgtcctgtttcggattgaaatccggatccatgatgatgaccgtatcagcagtggcgaggttgattccaacaccacccgaccgtgtcgaaagcaagaatgcgaagaacggggaatccggcgcgttgaactcatcgatgctcttctgtttctctcgtgaagacattcttccatccaggcgacggtacttgagctccaatccagcgaggaaatcttcaacaatgtcgagattctctaaaaactgactgaagatgaggacacggtgtccgcgtgctcgaagttgcggtagcattaagttcagcaaccggagttttccggatgcttcgaccaaacgatgatgggaaagctggggatcgatggtttgctcttcaatgtcgcggttgtaaatgtacgggtggcaaagacacttccgcagctgtatgaggatattgttcaggttatgtcgctctgctttcttcaacgccccagtttgcttcttgcaaatagccttgataagctgcgggttctttttaagaattgacctgtacagcttcttctgcacaacggacatcgaaatcggaatgatgatctgcaccatcggggggaggaacggcagaacctctgccttcgttcgacgcagtaggcatggccggatcatatcgtggagctcgcgaatagcatccttgtcgagcgttcctgcatattgggcctccaacttctcagcattgtaagtcggatcaatgaactggacgaggttgaacaactctctgatgttgttctgcagaggtgtgccagtgagcagcagcttgaaaccgaatttcatgcgacgaaggcgctcatagagctgggtcttgtcattcttcagacgctggccttcatcaaccaccaagccggcccaattgatgctggccaagactcgcttagccccgtcatcacacatactctcgtacgaggcaatgaccacatggcaacacaaagtgccattctcgtggaacatctcgtagtcctgggctatctcgcgagaaaaggcactgccataataggtgacaacccggacctccggggaccagcttttgatctcgcggcgccagtttggcacagtcgcattcggaacaacaaccaggaatgggaaacactggagtctctcaatcaacgccgagaacagggtcagaacctggattgtctttccgaggcccatatcatcagcaagaatagcgttcttttgcttgaagaacatgtaaagcagccagttcacgccatccagctggtactccatgagctcaccgccggtcaccaactcaggctgggagtccagcataaggctctcgtcaaactcattttcgcggaccacttggagattgcttcggagatctttcggcctcaaggggtgaatatcctctcggagcaccctgtcgacaagagcaatctggaaatcctcccaacgagctgcatcggtttgacttgggggatcttcccagactgaatcttcgtagggcaaccctttgaacttgacgtacgcccgcttaaccatctcggggcgggctcgatcctctttggattcgggctcagtgtgatattcgacatcaaagataatgtccacccgcagattgtcttcgggaacagcctcgactgttgtcataatgggcttggtggatctatctgacttgaggaacgccttcatctggctggcgggagccttggaagagacccagtctccagtcaaccaggtgacacggaagtaagacataccatgccacttgatgagatactctttgtcaatctccgggatcatttcaaccaactgcggaacgacttcgacttcgaaattctttggtctccaagccacgatcacgtggatggggttggatccaggaggagattcagagcattcattgcattgccagtcatcaggatcaatatcggcacgatccttcccttccgtgtttggtagatgctgaatgtggaaggctcgcttgcagctatgattgccaccaaggcatctgatgaggacattatcaacattgttgacgcgggccatatccacgtgggtaattggatcgacgccgtcgttagcttcccgtaattgctgctcaacctgggaagaaagagtctctcgcaaaggctgcgacatgggaccttcctccctgcacacggcacagtggcccaaatgaggcctcatatcatgctcttgatgcttaatccccaaacaccgactgcattgaagaatgaaatccccatcgccaaccttggtggccaaatgctttcggctgcttcgatcgccaagacacacttgatggtacgacacagtacagccttgacagaaaatcaaaggccctttttcgaggtcatggtcttcatagccgcattgggcacatgattgggagtggcacagtctgaactcattgtcgtcaggcagctcacggaactgctcctttgcgcctgagaacttttgctgcttaggcttttcaggttcggcctcagaatattcgtcatcttcaagtcgctctttcatgttgcgtcgacgagtctttcgtaggcgggaggatgttcgcttgactttgcctgtatcggaggcagaagactcctcggaccattcgcgagcacggcgtttgcccttcttaacacctcttctcaagtggcggcgtctggttggagggtcatcttcatcgtcatcactagactcatctgagtcttcgacgtgcacgctgctgctatctccatcgtcgctttgatgatcaccattatcttcatcctcgctgcggaagaaatgatcgtaccggatggatgggccacgacgttggcgtcttcgtgcaattccccaatccatgtctgaatcatagtctgcagggccatctacacccgagtagatgtgtgaaatgggtctgtggtccattgcgaggggatcaggactctgtgagtcgcggttgaattcacgcaaagcctcccgtccgttcttgaggcttttcaatttattgagggtcatctagtgaaagtcacggtcagttgaatggggcttgagattgattgactaattgatagtgttcacttactgtctgacgttcaccactcttcagtctaacaatgagcttgggctcatgcatatcaactgcaagaatgcgatgaacttcgaagtgaccaggcaaatactcatagtcctcagggttgttgaccactgggacaaggatctcaaaagactttgttggttcttctgagttaccagtgacctgttgcactggctggagggcatcttcagaaccctgaggtgccatgactgaggtctggcgagaggaagcgctctggaattgcgctaacaaatgcgcagccatcgcatcagggtcatcagaggtcgaagaactgtctctggattgagacatggtgatctttcgatcagacgaaggatcagaagagaatgctgggtctgtaggagccgcacatgcggatcctacagtgaggatttgaaagacaactaaattcacttgagcagtgaagtgggcatgcaaacgaaggtaggattgatgattccaatggacaaccaaggaagctttgagttcactggatggccaaagggaagatggggatgaagggatgaaatgagaatgatgagaatgatgagtgaaagaaaagggaagcgagggaagagaagagtcgaagtcgagaagcctggatgcatacacgacagacctcagatcgcggcggcgcgtccaacgcgcgataagccgataagaacgggagcgggtagagacctatcgcgcaaatcgatatcgaagttctgtgggcgaggacccggaggacttatgaagaccggaacttcgcacaatgctcagtactatctcaagaaaggggctgagtggtttttcaagagtgacgaggacctcgcattctacggcattgacgattcgacatgcatcgttaaactcagcaattggggaggggatccgccgagataatcgtcgcggcaacagtttgtctaaacgcgaaggacaatacgaggggcaatacggagcacgacaatacgagagatcaagtacatctggtttcaatgaccgtcaaacaaacggaccgcgacagtacggaaagcaaaaatacgagagatcggatcaatcccacttcagtgaccgtcggatatatggagcgcgacagcatgaagaccgaaagccccagagaccaggattgaaacccactgttaatcgaaactacggccagggtgagcgagaatacggagcgaagaagacctggccatcagacagtgcaggtcgtaaagactatgatcgccgacaatcgccattgaacgacaacttcagctccacacgacaaagccaaaaggaagagaagtttgaattcgacgaggatgagttcatccgctctggggatttccgagggctccctcgtgagcatcaatcacggttccaatcacggttccagtcacgaacgcaagacggaccatttacacagtcgggacggggaaggccttcaaaggatgaaccgcgggagaaggagccagcaagacctagggctcaccgggtcacgcacagcatgccagagcgtgtgaaggacaacgtcaaagtgcccgatacaatcccctacactacaccggcatctgagttcatttacgggaccggtgcggtggaggcggcgctacgctgcagtcggcgtcaactatacaagctgtatatctatcagagcacggaggaagagctaaccgcagcaaaggtcacaatccgcaaactggcattgtcaaagaacgttgcagtaaaaatggcatttgcgggctgggatcgactcatggataagatgagtgctgggcgacctcacaatggctgcattttggaggcatcccctttaccaaaattgccagtgcgcagcctgcaggctgtcccatctatatccgaggagtatttccggacggagcttgcgccacaaacccgggaagaggctgcggtaaatggcaccgatgatcgtatccagatccatcatccttccccgcccccgcatggaactgaacaacgccatcgatatcccattgttctgctattggacggagtggtcgataccggcaatatgggcgctatcatccgctcatcctatttcctgggtgtcgatgcaattgttctagctggtcgcaactccgcaccattgtctcctatcacgatcaaatcttctgctggtgcagcagaaaatatgcctatccttcatgtgaagaatgaagttgacttcattcagcgatcccagcagaacgggtggcgattctatgctgcagatgcaccactccctgggtccgtgcagttggatcacatcccggccgacggtgatcaaagcggggccaaattgcccatcactactgcgcccagtgtgataatgatgggcagtgaggctaccggattgagctcgcatatcaagtcgcatgcaaatgcaatcatcagcattccaggtgcacggcaaagttccatcctgggcgttgaatcggatcctgcccgcatcgacagtctgaatgtgagtgtcgccgccgcgctactgatggagaagttcctgcggaccccaatcactgtgggtgagatcgtcaagaaggaaaagaacgtggaaaaaaacatgggaaaggagaaaatgtggtaatatgactgtaatatatgtattctagcatctacacagcattttgtacaatagcacataattggagtctctggtttgatttcttgactgttctgaattagggttagccatacatctcgaagaacgaagaacctcctttttgagaccgcccatgtacgcgatttccttttttcccactttctgctcactggtctattctccaggtttatctttccgtcagggttgcctattctctgatcctatgctgtgtgtgccggttgattcacgatcaaatcggtctctgccaggagaggacagcatgatcgtgaatttgttgatttgcttgtagacacacaaaaatgctggatcaaattggctcttccggctgccagaaggtgagtatggaaggcccgtaggacaggcacagtgtgatcattctcactaagaggttggtaacggtcctctttcactatgttggcagtggttgtactcaatgagccgatctcctcagttgggtcgtactcagaaagacaagtaatttgattctcaatcttcgcccaatatttcaacattaaacggagaataagcacttactcttggtttaggccatggtcatacccatcgagtcttatctttcgtttacactagccttggtggttggagagccgttggctggtgagagattgctaagaaggggaaggcacgtaggtggaaggcacctgggcatattaggtacaaccttggaaagatctcatctggacttcttcatttccctccgaatcaatttcaagagaatattattgaggttctgacaatatcccctaatctttattgctccttcggccctgtatccttcctagccacacccaaaaaggcccagaaagacatccaaccgagagctcaaggttgggaactgaaagtgccttggattcgggagcaccggataggcaaggcctcatcgaaagagaccctacagactggtaaattaccagctgcgcatggttcgatatctccctcatcctgatatcgacacagctttccgatatcttttggcctcattggcctgatcattgtcgtgacccttcttttttgggccattcggtatattgtatgcagcctccttcgtcctctgaattggtagttatgctaatgaaatatatttccagctttttggcacatgaggcaaagctcagtgacccccagagggcgctggctgaccatttcgtcaaacaaggccaagaaaaaaatggaggagaagaagagccggtggtgacaattggctgcggctatctcgatacaccccagaagcacttgtgggaagtgtaggaacccggatggatgaacaccttgaatcactagcactccgaaagtcctttgatctcaatactggaaacttaatcaaaatgcctacagcgctacataattgtgcacttggttccaagacacgcgagacaagtggatgaaagcccggccttctaaccacttgtctcatccaaagggccctattctctctgctcagttgatgatggtgctttgtgctaatccgtgagcctcctgcttatactgggtttccttgggactatgtaaagagtcgaaattgatatggtgaacgatcttgagttttcaaagcaaatacatcaaatatccagctcactgagtccgagcctagactagaagagatgcctaggtgaataatcaagcaaaatcagagaaaatatgtattttcccatcaagaaaagggagaccttgaaatataccgaaactcgcggccgaagttttgtggggaaatgggggggtgggggaagttcctgaagaacttgaagaacgtctcccctcaaccctaaaagatgtgtttctatcttttgtgaatagatacatatttatcactctataggaagatccttatattatcatcatgatcccagaaaaacagatcccaaccaccgcattcgtggtcgagaaaccaggagctccttttgtccttcaaaatgtaattcttgacgaagtccgggcaaatgaagtcttggttgaaatgaagtatactggcctctgccacacagtatgcatcctccattccgcaaagaatttctccaaatgaacaaaactaacaaaataaccttaggacatcgtcgtccaacagggcgcaatcccagtcggtgattatcccgccgtactaggccacgaaggcgccggaatagtccgccgcatcggcagcgccgtcaaagacaagtccctccaagaaggcgaccttgtcttcctaagcttcagctcctgtcacgaagaatcatgcagtccctgcagcaaaggccgaaacggattctgcgaccagatgacatccattaacttcgccggggctcggggtctcaccgctgccgagtcacccatctctttccccggcggaagcccaatccgaggccagttcttcggacagtcctccatgagcaagctggctgtggtggacgagcggtcggtcgtcaagtcccctcccggatctggagtcacggtcgaggacatggcggtccttgctcctcttggatgtggatatctcactggtgctggcaccgtctttaatgtgctcaagcctacatcgaaaagtcgccttgctgttattggtatgggcgctgtcggggtggcggctatgttggctgcacggtcttcgggagttgaaactgttatcgcggttgatattgttgatgcgaagctcgagctggcgaagtctcttggtgcatcgcatacgttgaacacgaagagtgtatcggatcttacacaggggttgttggatatactcccggatggcgtggactgtatcctcgacacgacgggtgtagttcctctgctcgaggctgcggtcaaagctttgggccatgaaggtaccctagctattgtgggtgttgctcgtgctggctcatctctcaacatcgatcctttgaaactcatgatgggttgtcagcgtgttgttggtgtgattgagggttgcgcgaatcccgctgttgtgagtcttctttttgaaaatcacttgagccatgactaacctttcctcttccagattgttccacaactgattgatctgtacaagcgaggaaaattcccggtcgataaacttgctaagatttatgccccgagcgactttgagcaagccatggcggatttgcactctggaagtgtaagtgttccaaatcaatgtttcaacgagacaagctaacaaatgtactccctacaggttatcaagcccgtcatccaatgggcagacctgtgatactatgattcgggtatgcatataagggcgcttttcacttggtggtgggattgtttctattggtgaatcgtagcatgcttctcttcctgttcatatagtggcagtttattatgtagtaaatgaacatctagaatgtccaggtgtacatcacaagcaagttccgcgaccccatttacatgatgcatatgcctagcttgagtcagaaggtacagagagattctggcgaagctcctttcgctgcacagcaccaaagcgaagattgcccacatcgaagacctaatcacctgattagtttgtgcaactgtgaaccccaaaaaagagcatatcactcactgcatagatagccttcaggaaggtatcacctagaatgtccatagtcatagtaccacgactttggatgcctccatagacataaccagatttagcctcagcgaatccaagatcttccttctgcacaacaaactgcttctcgccaacagcaaaagatacaacaggcaatttatcagccggtgtattcgatggaaagatccatccctggctggcattatcatactttgccccggggatagcatcataaacggcctgacaggtttcatcatccaccagtgccaaagtagtccccgtatcagcaatagccttgtttccagccctagcaatcgatttcccattcaccgtcgccgaggtagaatcgaacatccaaaacccctgactgttatcgacaggcgtgtagtagatctcagactcagcggccttcaccgtgtcctgatcaacgtaaccaaatgtatagaacgactcgcccttatccggctcatcagtgtctctccaggaccccagcttcgccgtgaagagctcagccgacttcgggatgtcagcctgcgagatcatattctccacaggcatggccacagcctcgggcttgacggtattgatattactgaacgcaagacctagcagtccatccccagcgccttgtgcgaattgctcggacaagatatcggcgatcccaacagcttggcctttgacgaccagcccgccgatagtgacattatcgttgccgaccgtgccggaggcaaaagagccatcgccgtacttaatctgccacgtcgagccgtccttttcttcgaatgtgctcgatttggtcggatcgaagactctgtggttcttgttcgccgacagaatcttagacgatagctccgtggaccagacctagacacgcttagtagctttcatatcatagcaaaagcaaaagaaaaagtatttctcttacccacagatccgcagatccagtatcgaagtccaaattgagcgtctgtgcaggcgtgccaatgccaatttcggcaagatacatcgagtcattctgcacgtcgtggacacccacttgtccgacctcgtcgctgacagcgtcctttttctgtaacacctgctgcaaccgagctcggcctcccacgggcttattggtgaactgtcggcctgtttgtaccattgtcgtgccgaggaaatatgggccgtccttggtcggtgtgaagcgatacttgcgcatggcatacaagtacgacttcgtgccggacttctggtagtgcgggttcgcgatgagcttgattctggtcatggtgggatgttttttaggtagttttggtttgaggaattagtggatggatggctggggttgggatctccccatgtacttatgctggaatattatcatgggaggtgtttgaaacaagcgtcgtcatggcttttaagtattgcgatgcctagcgaagtcattttgatggagacgaaatcttagaaacctggattccgtcatcgcagacaacttgggattagtgttgtttcagcagtgtgatggaggtggtattcgatctgcacgatgatgcggactccggtcagggataatttgtcaactgggattatacagcgatgatacgacaagcctttagaagtaaaacaaataactctatttcaattacaaaagtacattaaaacatctgcgccgatcacaaacccgcccttaatacccgaatcaccaataaccttagcaaactgggaacgtacacactcgtggaccttcaatccacattacctcttgcgactcttagacttagtcgctgcagtactaggagctcgggagcttgcggcagaggcagtcttgctaccacccttagtggtcttggcttgcttggccggctgtaaaaagaaaatcaagttagatccaaagtaataaagtaatcgatgagaccaaacttacggcagctccgttcttagccttcttcttggcaggaggcgcttcttccatctcttcctcctcgtcacgatcacgaccgcggcctttgccttcgctgggctcgaattccttcgccacggtgttcagcagagtagtgcagcggcgaccaatttccaccggtgtacgactgagcatgaagaaatcgaatcggaacagaggtgaatcacgaatctcttcacggatgttctcatacaaatcctcaccctcgacgccatacttgtccagcatgattaacaagaatcggtcctcatcctcggtgtaaacctttttgttggtggtggacacggtgtagttgatcttgagctgctgaagcggcacgcggtacatctccaacttcttgcgaagcatcttccgctggtgatctatcttccgtaccttctcctcaccctggtcaatgactcggaggtacttaggatagtcctggatctcggtgtagcggcgccagaagacttcggcatattccttaatctcatcgggttccttgctgtccacctcagtggcaatacccttgtagtcggtgcggccaaacttggcagacccattgataaattgctggaaatcacgtcggttccaggttccgaagccttcttccgacatgcgagctttctcggcttgctcctcctcagtaagcgggacagcgttgtcaatctcctgttgttcaaggtcccgctcagcctctcgctcactgagctcctcttcggggccttcaggtaattgagccttgtagccaatttccttgtggaaataggccgtctccttctcttggagctcatggagaccaggagggaagaattgccagtcgtggacggtgatttgtttaggagcacgtgggaccttgggctttgtatcggcggttcggccgccagtggccaaggcttggcggtagtatttgtcaatggaatagaattgctctttgcgctcacgcttggctgggttgatccagctgatgccaatatccttcttccgctcggtgaaatctttaccgttccattcatatgcactctcggaggagaacttctgcaagtcatcaatgccgagcgcctcgtacttcttattgagctctgcagttcgctcttcacctttacgtaggatagtctcgatatcctcatcttcggccatttcggttgcatccacgcccttggtgaagacgtcggcagcaccgtgctgaatcatgccaaggaggtcttctttcgaagacgctttactggcctgttgtccggagcgaccttgttgaatgacaagctgatccaggcgtagtttctgagctgctcgctccagaaccttctcttcaatggccttctctgtgatgaatcggaaaacttttacctgcttggtttgaccaatgcggtgggctcgatccatggcctgcagatcagcttgcgggttccagtcactgtcgaagagaacgacgatatcggccgaggttaagttgatacccaggccacccgccctggtggtaagaaggaaaacgaatttgtcggatccgggtttgttgtagtcatcaatggcagcaatgcgatcctcatgtgccgtagtaccatcgatacggcagtagttgtagtctcggaaacaacagtagtcttccaaaatatccagtacacgactcatttgagagaagatgagcacacgactaccatccgcttgcatacgcttcagaagtttgtccagaatgaccatctttcccgaattgaaaacaagatgttcgtcggtcgtatacggaggacctggttcagccccctcgaacaggtagggatggttgcaacacttccgcagttgcatgacaatgttcaacaagcgggttttggactcgcgcttcccagcggcaccgttgacagcgtcaatatctttctccagaattttctggtaccacctccgttgcatttcagacattgggacatagaggtttagttctttcttcggcagcaaactcttctcaacatcactcttcacacgtcgaagcaagaaagggcggagaacacggtggagttgctgcaccacggcgtcttggtctgagtcttgatttgagaaccattggtcaaatgcctccgaatcgccgaagacatctgggagaaggaagttgagcaaagcccacagttcatgcaagttgttctgtagcggagtgccagtaatcaacaaccgattgcgggagttgaaaagacggataatctgcgacaatgacgattcttcgtttttgatccgatgggcctcgtcgatgataatgtattcccaggcaaacttcttcaggtgcgacttctcgcggaggatcatttcataactggtgatgcaaacatcaaactcctcctcgactaagcgctcattaatcaactgctgccgttcttctttgttgccttggagcaccaggacgtcgatgtcaggggtccactttgcgaactctcgcttccagttgtccagggttgacttcggcacgacgaccaaatgaggcccgttgatatcgcggatgtagcgtagatagcctaggaacgagatcgtctgcagggtcttaccgagacccatctcatcggccaggatacctgagataccgttctcatgtagcgaaacgagccagttcacgcctgcaacctggtaatcacgcagctcaccgtggataaatgctggtgactctcggaagatggtggtgctatcgccgccctgcttttcatcttggagcagctctgcgtcttcttcttgttcggtcctgcggcgccgctccccaccagcacccccggagcgcttagagcccttgcgggccttttcatcagcctctgcattttgtcggtcaatttccgccataatctccttgatccgagggtttggattcgtatcgatgaaatggcgaaacaggtcagtgagaccaagaaggtatcggaatcggcgaatcgagtcatcctcctgcataacattatgtatcagcaaatggatcgtcagcaatattatcttatcacccataccttcgtattatcgaggcggccatgcttcttgcctaggatgctttttctgaggtggttggcctcagatctgcgcctacgtccatcagccgccgcgtcgcccgcaacgctgctttcagtggtgttgggatttgtgtcagagtcctattcaggtagttagcaactttccttctctaatacacagtgttgtagaccaagggtgtcttaccgtgtaatctggggtgtcttggcggctctagattgcgaaagaatattagcatgagcttggaacaaaaaaaaagaaaagaaaaaaaaaggcagatacatatggcatgtcacgccagaagtttgaactacaaaagtaggaacaatctcacataccatttgcgcgtcggcactatccacgggcaccgaagggaccgtgtcgtcatttgtatcagtcatgggagtatcagcctgcgagaccggatcagacgcgagggcaggagccatgatttatctccggtgaacagtgcaggtgcgctggctgtttaaacacgtctttgagcgtgcaacaaagaatatcggaagctcgcgattagtcggatcgcgtagtgcaggaagaaagaaccagctagggtcggagtgatgaggaagtgacggcgattgtccaaatatagtccaaggtaagtctaaaattgtaagcaactcatcaatggggttcccatataatgatgctattgaacaattctaggccaggattattgaacgtactcaaagcgcgtcgatggcaaatcaagataccgcctttcggtagggcctgcggtatggaatattgttattccgtcggaaagtgggcttctcgttaccgggccagggcggtcatctgcaacaaccttgaaattgaaagttcctccgttgacacatcttgcttattgttgcacagctgggtgaacaacaacctccatatctctgattctagctgtgctggcactggcctcctttcttgctacagtctcccccattccaacttccctcttgcaccacctccaagctcttcgctatcgccatttggccaccgacgaacgacgcacggcgcacggcatacggcatagctgtcaacgcaaacactttcatcctcagaaccattgcccaacagggccctgacatcgtttcctgccatggactctatgaggtccctcaacacctctcttccgagctcgacaccccgcccgcaacctccggagcaactcctccagcaattcaaggcggcagctctatcagtcacaaacctgtacaagaatgcagtatgtgaacaagcccaggcaagatcgttaggataccaggaagcgatagaggatctgcttcacttccttgaccgtgagaacctcggtctcggagacggagaggggtggaaggttcggcaatgggcaactgaaaaatgtgacggaactgggtcacaaagtagcgatgaagacgcagaggtcgacaagcgtgaccgaagtgctactccagctactgctcgcaaagaaaaacctacacctgaaccgattgctcgtcaaccccccacttcagcgcccgtacccgcatccaagccagaatcgaccactccttccacgcaactccacgaaacaccttcttttgccacacctgctgtcttcacattctctgctggtcctacgtaccctcagtgtcaagagctcgacatggatgtgcagtcgtcagacaactcatctgcaaccatgcaggacggcgctcctgtgagcgtctcagtgatgcctcggaacagaccacaccatcgtcacaacaaccacccacgatcaaacgcgcgcccttcaccacgggagtctcccgccagtattggatccaagaggaaattcactttccctgatttcttcgatctgtcaggtcttaacaacggacgagatgcgtcaggaggaggtgggaaacgaggccgctttacctaggctgcaacctagataaagcattatatgatgacgaagtgacgaccattcccttctgattgtcacacagtggctggttgagatttcgggtatgaaggtgcttttcgggtgcataacaagggaggggcattttgcatatggtttcgttttgttcttctcttccttggctttctttcgtgtcttcttgtctctttcttttatcttactttccccccttacccttgtgatatagcatatagacggttatgcctgtggtgatacccgatacccggagtggcaattatcattggcttgcgactaaataacaatcaatatcttacaaagcttccaacctgcacttcgctatcaaccttggaaacaaccagcttgcgcgaccctcgctttcatcacatcccgtatgctctagtacgtgttcaatatacaatgctcagttaaacgcccgccacagccccattcctactaatgtcgcagagatcgaggcaatccccaacttgcgcgagcccatcttgtatcttgtgggacctttcatgatggccttctcttgtttccggagattggtcattccggtgtagtagctgtagactccgaggccaataaaagcagcagatcctattgcaggatgtcagcacacctaatgctagtaaaatacaagcccaggtcacaggccaaagataaagcataccagttattctgcaggacaaacagtcgtcgtacttgtcctcggccagagcctgcttggcgtttttcggctgggtatccatggcgcgcttatcagaggagatgaatgtgtatagagggtatttcgatattgttcagaacaagacatacgttgatgtctgtttgtctccaaaaagttatcggaaggcggggatccgcggcaaaatacgagagctatgcgatctacgccgagcagagtaatctcatcatcagacaactgtcaccatgagcggcgagattgatgccgtctacgtatatgacgagcaaaagtgggatattccgcacccgccttgcaagaccacactaacccgtcctccctagcgcccctctcatcgaacatgtatatcgatcccgcccgccttcggcctccgccatcctgcccctctaccttgcccatgccgagccacgcccttcgttgctgtatatccctagcgcttcaccgccggtgacggtattctcgacggttgagtcgaatctgttgtttcttgcaataagcgaagtcgacacggagccccttctagcactcgagttcctgcaccgcgtgatcgatgtgctcgaggactttgttggagcaccgctgctttcaactaaggtccaggcaaattacaatgttgttgcgcagcttcttaatgaaatgtgtgatggcggaacagtatgcaataccgaacccaatgcattgcaggaggttgttgaggttcccgggtggatggggaagctgctaggtggaatcggagtacctgggtgagcagctattgacattgcaagagatattgtctgatattaatgggttcatgtgggtttaggacatctacaccagctctaggatctaccaatcctctcaagcaatctctcgccgccgccagtgtatcacaaggacccgccattccttggcgacgacccggtgtacgacatacctccaatgagctatatgtcgacatcattgaatctctatctgttactatggctccttcaggacgactgctgtctgcattagtatctgggaccattgcattcactgcgaagatatcgggagttccagaccttctgctatcgttatcagcacccggtgggcagcatgtgcttggccgcaagatcgagctaccagtgtttcacccatgtgtcagactggcgcgatggaaggaacggccgggggagctcagcttcatccccccggatgggcggtttatcttggctggatatgaagtggatctccttcctatagatcccgacttggacgagccaccaagccatatggaaaagcttttcctgcctgctatagtggatatccgcaaatcactcggaccgtctggatccgactttgaggttcgactgactttgaacacaaatttcccgggccaaagctcatcctcgcggcctggagctacccgaagcggctccggcgcatcaacaccgtcattcctaggtgggggcggaagtggaagctccggaccagcacttgaagaggttgtcgttagtgtaccgatctcaaagtccgtccgccatatcacggacatgcaggccagccgtggtgacgctcaattcctccccgcaaccgggctactagagtggcggattcccactggcaaggatgccggaacattgactggaaccgccacactgcgttgcagcgtctcaggctatccatccgctgacgatgacctcgaagacagcgtcggggatgccgacgaagacgccaatgccaacctcctgcaaggctactacgaggcgcctacctcctacaacgatgcaaccggcagttcatcaaagaaaacccgatcctccgacccctccaagcgcaaaaagaagaagaagaagtcaacaaagaagacctcccgctccgctgccttacaaccagaagacgcggaagaagaccgcattgcagctaccaccccatccccaaatcgctccatacctcagacccccacaccccctccccaatcacaatcccagtacaacgcccacctccccgcattcttcgctccatcatctacatcccgtcccacgcgccgaacaaaagcccaggtcaatgcaagcctgatgcccaactcggcgtcagtatccttctccgtgcgaggctggcttccctctggtatcaaagtggacagtctcaacatcgaccaacgtcgcagtcgcggcttaggcgaaagcgtcaagccatacaagggtgtcaagtacctgtgcgttagtaatcgtggcgtggaacggcgctgctagagcccgatgtacttgatttagtttccttttttggtcagatggaccgaggcatttgtctgggatagcgcattcgataaccactgcatttgacagcatgaatgatgatatggatgttggatctgtctatttcttctaacgagggggtttactttggtgtaatgctgtaggtttgctttttgtacaaagactccctctcttcccttccatgggtattttattatgggagctccgaggctccaatgccaatctatggatatgtgatgtctagtgaactacacaatcgcctacagggaataatacaccaagaaaaccaaaagaatagatgaatcgaaaatatacatggctcaaatatcagaaacaaaagcataccttatccaaaagaacaattaaatccaaagtacatactcacctacatggcagaattattttactagaaaagatcccaaaatcatgcgtccaacttctccaagacgaggagtgatcagcaccgaagccgcggggttgactctaagcgactgctttggacggaatagcgtcgatcaaaaagggtatccaagttcagggggaagcggtcacgttcacaatttcgaagatcggcgttcaaggacctgcaggacgatgtaggcaactattacgggttagactgtaatatccaaaagttttgataggtatgagctgcagattgaagcagacgtaaaaacgcaatagaatgaaagataagattcattcatattcgcagattatgatatctttttccctcaattccggggtatgacatgctcagaaaggggtaaaatggtgacaaagtgtaaggaaatggtaaagatagacatcctcggaggggatagaacagaattaaggcagtacatgaggttgggggtatattggataggcagggattatgcgtttcatcgtctggaccataaaagagccacagacggggttggtacaagggcctcggaacttagttctcctcttcatccgaaggagagaagcctccaagaccatattaagccacccacgagacagatatgtgcaagatgcgggaaatattcacagaaatggcgaaaaaaatgagcaggaaattaagaggatcacttactggcagcaagagcagtagctctagcagctccagccttcgcactgcctccacccaaggtgaagatgcagcgcagccagccgcagctcagcttcttgccgttgcggtcaaagtctgggcgcagagcactggcagcattgaacttgctgatcttgccggcgtacggcgggtagcggatcgccaggatggactccagccagcttgggctggaggtgatagggcggcggtgcacccagacgtcaaagctggagcggccgcggtaagcaccgtagccactctcgccgacaccgccgaagggcagggttgggatgtgcagcgcggcatcgttgcaggaaacgccgccggagcgggtgcaagacacaactaggagagagggttagaatcgctgtctttacggggtatcagacataagacaggagaaaagagaaacttactcttctcgacatcggccttgttgccgaagggatagagacccagcggcgtgctctgcacaccattggccaggctgatggcctcgtcgaggttctccacaggcaagatggggataaagggaccgaagctctcctgcgagcacagggagtcatcaaccgagtcgacctggacaacggtcggctcgatgaacagctccttctcatccatagtgccacccataaggatcttgcccttagtattatcaagcatggacttgagacgggcgaaggaggtctcgttgacgatgcgcgcgtaatcaggcgagcccttagcaccctgggggtagaactccttgtacgcgttcttgaactcctgtacgacctccgaaacgagcgacttgtcgaccaacaggtagttctgcgaggtgcagacctggccggcgttcaggagcttaccccagagcatacggcgggcgacaagacgcgggttcgcgttcttggacacgatagctgggttgataccgccaagctccagcacgacaggggtcatatgctgtgcagcggccttggcgatgatgcgtccgacggtggcgccgccagtgaagaagatcttgtcccaccgctcggcgagcaaggcctgtgtctcggggatacctccctggataattgtgtagcatgagggatcgacactggcctcgatgatcttttgcataacagccgcactgcggggagcattttcgctaggcttgatcaccactgtgtttccggcggcgatggcaccgatggcggggccgagagtcagctggaaggggaagttaaaggcactagaggagagagagtcttgttagccttcggggaattttctcaggcgcattgcgaaggagaggagacgtacccaatgaccagcacagtaccgaggggatcctttctgattttagggttcatgaacttgaaggcgagatcgatatcggaggccttctcatccttggcccatttgcgcaggttgcgcgtagtgaacacaatgtcattcaggagccatccgctctctccgaggttggtctcgaaccgaggcttgttcaggtcctgggcgcaggcctccataatggcctcctcattatctttgatgctggaacagtgttagttaattgaccggaaagacaacagaggtcaatactcacgcccagtacagcttgcgcagctggacgaggcggaactccaggtcgcgggtcttgtgctcataaaacgccttgcgggccgtggagacacgcgaagggatctcgtcaagcgacgtagctttgaattcaggtaggtcaaccatgatggggataaattaagataaattaactaaaagagagaagaggaaaaaagtgcgagaggttctgggtatataagtgtgggcactccccgctacctattcggtagcaatactccgtacatacaacataataggatctacaacggccattcccgcaccgattacatatatgtacggtaatttttaggtagcatgtacctgcatcagtcttgatatagctacgtttgcacggagtacacagtacttcgtattccgcatactgtactcctaactatactattgtactattgtacccctattcaaacgttcgaggctccgcacatgctccgagctctcggctcattctggtttcggtctggtgcgtcctttttctgtgtttcgctttgaggagacgaatacctatatgtatatgtatggatttaggcagtaatacctacatgtattaatacctattgcaccaatgctactagtacaggatatatcaaagtacgaaccgcggcttcacgcgaactgccccgctcgaatatgatcgacactgggtggttttctgcatatgttctagccgaatcaaaaagtggagataatcttattagcttggcgttgacactcggagtattaactgtgctagttatacgggaattaaaagtatttaggaagtcaacatagagagcactatttgtaaacctatgactacctaaattcaaaatgacaaaaaagacaaaaaagacaaaaaaagcattgaatcactgaattggggtatccaaacatttgaacgtcagtcgctgaaagattcgtagattcatcaaggaaagaagcgtaagtgttgttccccgggttctccaaggctggatcgtgtccattccgtcagatgcacaccagcacggctgggcaaaaatcaaattcttcttccaaggttgacgcgtagatacggcacatgtactgccgattgtaccagttaccatagcaaggcatgtctcatgcgtcgagtttcaagctcgaagttatcgcgcttgttagggtcctttccattctttccacatgcgtcagtcgcttgcttgccctttttatttggcgacagagatcccagcggatgccgtcttctctcgaactgcgctcgctcaaaatcaatgaacatcacccgaccgctatcctcattgtagaccatgttgccggcaattggatcactgtggagcacgcctaattcgtgaatagcatgtagcgagacttccgcgagacgaattagccgatctggctcgatttgggttatcatagccagtgtcctgcccgcataccccatcaacatgaagtgcacaatctccgcgatgccgtcgtaaaagattgacgaacggagatctaggccgcccagtacaacaggcacgtgcaccccctgtagtggacggagacgcgaatacatgcgctcctcatgttggacatgttcaatgaactcgataggcacacctttgccaacgaaagtatacccgtgagacaacaaagtcactttaaacagggctccacgtgtgccatggatatgcaaggattcgcatcccatctccacgtcaggatccgggtcatgcccgaagaattgccgatccaagagacggatgagtgtggcccggctgattggatgtcgatcaactccatggtccagcacattggggcatttctgatccaatttccctccggtgaccaagcctaagaggcactgttgtgtacaatactggcgagacttgccctttgaggaagagtctcctcgtcctcctcgtgactttgttgcagctgaggatgggggcaaggctgaggaatcggtgcggggaccccggggccctcgactgggggtgtgtgagttgggtccgtcgggagaatcatcagactcggacaaactcagagcctccaacggagtgcaggatgcgaatgttgcagcggtggactttgatcgagtcttgacaggagacaagcggccgaaactggtgctggtccgcgggggcttgtattctgaagagggcacttctaggttggatatttcgtcgagaaggtcgtcgtgtatcattttccatttttccaatctggccgttgcccagttgctccactcaatacctcgcggcggtgtctgcaaagctcggagggtgaaagccaacacttgaccgactgctgtcaagtgtaatctgttgtcgtcacttgggttaccagtccatccagttgtatcaccaacgtcttctctcggcaccgatagatagtagtatacggtgaaaggatcatcgcgtggaacacgcagaaatatgaatgcttcgccggtacacgcatatccaaactccagccccgcagtgatcatgtaggaaaatgcctgtgtgatgactgcagccacaacgcgccggcaaatgtcttctggcgtctcatctttctgatagcgaaccacctggtcgacctccatgtccgagagcccggccattatatgcgcgagcgtgagcttatgtggcggtttgtattcgacgatgaaggcaggaagactttccttgggtttcctgttgtgcacattgtacacacaaaactggtccgctcggggtctaggttgcttttgcttcccagactcttggcttgtcgcatctggctgggactgtctcgcgaccaatcggtctgagcgacgcggttgcttcggctccaagctcatggattccattttttccgccattgactgaccggccgttaatgtattcgcatggttttcgaaggccacgtcccccttaaggtgaaagacttgtcggatttgcgggcttgcatagagctgcctgatgatactggtgacacgcgactcgaccgtgaaccgttcaaaatagccgagatcaagctctgaactcaacattctttctcggacatctttaccaaattccttcagcacaagtagcgccacaaaatggcgctgggtgacaaaatcgacgtccataagatccgcccatatagcggcctgctcctgcggaaatcccgtccactcccgaatcttatttgggcgatacttattctctgcatttgccgggtcgcctctggttgatgagtacggatcttcttgtatggctaggccaagaaataagtggacatggcaagcatcaagaaactcaggaagggtggtatttcgagtctggagcctttcttcggtcagttgtcgctgggcctccgcctcgcgtttgttggcctcagccgcgtgtttgttggcctcagtcgcacgcttttcagcttcctccacacgtcggagcaagtctgatatctcacgatccattattggcatattcttcgaaagttgaggttgagaaaagtctgtaaagcaacttttaggtcgggctgcgttgtgttgattgcctttttcggaagcaaacgcacgggccccgctttccctagccaatcatatcccttacagtcggtctcatagcatacaacatagtgaggagagtttccaaggaaacaaacaaagagacctctggggggagatattagatcacgtaccagtcacgtgatgtttatcagttattacccaaagagcagctagaagaactgtcagacaagagcaagcaaaagcatcaccgaaaacccccaaaaatacccccaaaaatactcccaaaaagacatggaatgcacataacatccatagaaatacaacatccatggatggccttatgcttccaaggttatctacaacgcttactctcctctcacttctcctcactttccttgcctatcttttactctcgctttatcaggcgggaattaaacaatcagaacacctgatgcagagttcctagcggagattacggcctaatatacatacctgttgacatgcatggtatgtctttatgcctttgtccctttgtgcagactgagcttttgctttgtcagtttgatatgtcagtttgccattactttgttagtacaggcttcatatacagcctgtttttccatagattcatagtgtgcatcttcttcccgattttcccctccatgctagttcttctcactagttgtcctccgtagcctcaacaggttatgagcccttactgacagttgtactattctcaatgtgaactgagagatatagcacaaagcagatgtgctattctcaacgttcaaaccagcaagatatagcctgagacnnnnnnnnnnnnnnnnnnnnnnnnnnnnnnnnnnnnnnnnnnnnnnnnnnnnnnnnnnnnnnnnnnnnnnnnnnnnnnnnnnnnnnnnnnnnnnnnnnnngccctcgttttacccctttgctttatttgcacgagatcctccccgcagtggagcctcgttatcactatcgagaatagcgctgtcatcaggctatatcttgctggtttgaacgttgagaatagcacaactgcttggtgctatatctctcagttcacattgagaatagtacaactgtctagtactatatctctcacttttgggaatagctttgaaggctatatctctcacttttggagaatactacgatagtatatctctcatttttctttgagaatactactggatagtatatctcactttgttgcatataccctttgttaaagaggggtgcatcactcacttggatttgcatggtgattgcatttctgacttctttatcacttttgacaaagagagtatcttaccggagtactatctctttattcttgacaaagaagctttgttgtatgagcatctccccgcgggggagcctcactatcaagaatagcactatcaataggctatatcttgctttattgggagaatagatttgaagtctatatctctcactttttttcgagaatagctttgaaggctatatctcatttttttttgagaatactactggatagtatatctcactttgatttgcatatactctttgttaaaatggggtgcatttctcacttctttaaaagagagtatctcaccggagtactatctcttttgacaaagaagctttgttgtagaatctcacgttgagaactacattcactttttatcagccacgatggctgaatcctccaatcaacaataacctaccgccatgcaaccaaaccgaaactggcatgccaagcgagacatcgttgttgtagaccaagctgtcggtctacctgactatgctttttactgcaatttttactatgatttttactatgcgaaccagattgatttttgcttttgatgctcagtcttgggggggggtgtgttgacatgcatggtatgtctttatgcctttgtccctttgtgcagactgagcttttgctttgtcggtttgatatgtcagtttgccattcctttgttagtacaggcttcatatacagcctgtttttccatagattcatagtatgcatcttcttcccgattttcccctccatgctagttcttctcactagttgtcctccttcgtagcctcaacaataccgcttcggcgacaattggatgttccggttgtttcttttggcctaggggtcaattgcgctcatgtaaatcactcaggtgcagcggcctaagacaggttagcgcctggattacagagctacctccggccggtagatggcagtttgtatgcgtatcgaatgacatagcaacttcaccgtatattaagctacctaggagtgcatatcatcgaatatagtatcatgatcatgtaggcttggcaataacatttgaactccatgccaaactcaatgaattgtcagcacttttctattattacattacgtaggggccgtggataccttgtgcttgagtatataaatgtgtgtttgaagtcacgattgcatcacctcttcttccacgccaccaccacattcaaataaaacactagctctgtacatttttgcaagcttttacactcgactataattagtctcagagtcaagttcgctagcaagtgttacgttcaacaatggatgtccaagcagtatcccgtatgcagccccgatttccctattttgatccaatataactctgccaagtatccacccagctaattattgttaccttcatttagacgactttgttcaggactacaataataagttcaataacccggacgcaaggagcagcatggactcgttatacgtatgtccagtcaatgaattcgttggagacaaggcgagagctgacttggagtagcatccagagtcgatgttaatatgggacggcattcaacatcaaggcacgcacgaaatcatatcagccttaacagtgagtgtcttttactgaaagtgaacaaacggtgaatatccatgtctaactggtcgattcagggacctaatatgaggactgtgaagacgcatatcacgtctgtagacgctaccccatcggctaaccacggcgttctggttgttgttactgggaatttaactgtgagcgacatgtcccagatcgatgatgggcctggtaagccattgacctattcggcgactttctctctgcagcctatacctgaactgaagggtggattcttcatccacagccagatcttcagggctgtacgatcatagatggtctgcgtctatcctgtctcccgttccgagcggagcgcttgagtcattgcttgggcttccaaggttatggtcctttcctcctgacttccacgaggtccatctacggtttgcgaactttgcattatagagctttcgataagcctccgtctgtaatttcaacagaatacctccaaaagtcacattcattcaatatgtagacaatatgctgcgatttccaaaatgcaaaataaatcggccacctcactcatccaacgggagagtaagaccgacagggaatcaaatcaaagactgttagaagcaaagggaaacgccacaatcaataaaagcaaggcatcaagcacatatatagacagacagccgagaccatcagggtatcaacatgagcaccataaatcagttcttgaactgatcctcagtcacacccttacccatagcagcagtactgctcacaccgccagaaaccatcttcaacatgttatcgacgtagttagcaccactccacttctggtgggtgacgacgtcaacgccctgctccatctctggttcctgaacaagctcgccgtaggcgcgcatgccgttctgcgaataggccttggcgaactggtgcgagatcagcgcggtggtgtgcaatccagccagagtgatgaactgccacgcgtagccgagttcgccgagacgcttgatgtaagtctcctgctcgttgcggggcatggccttcttccagttgaaggagggtgagaggttgtaggcgagtctagttggagagtttgttagtttaaggctctagcatacgggaaactcagggcagaaagaaaacttacttttgctcgggccaaacggcgtgcacgccgtcagcgaattccttagcttggttgtaatcgggcagcttgctctccatccagatgagatcggcgaagggcgcgtatgcgatcgcgcggttgacggcgcattgggtgccgcccttgtagcggtagtagccctcgcgggtacggggagagtcccagttccagtagatgtcgacgccggtgaggttcttggcgatggcgcgggattcggtgttgctcttgcccttggaggcagagaggtactggtcgattaggctcttcttgttggcgtgggaaccggagttgatagtgtcgatgacggcttcactgaagagcttgagaccggcctggctgatccattggtcctcaatttcctgcagctgagcaccgttcttgccggcctgctcggcggcaaccattaggtcgttgagaggttgaaggcttgagtttgtggagcccacgatgaaggcgtggtcgcggtggtcgatggtcgatgtgatgagggtggcggcctcggagtcggtacgggcgatggccaggaggtcggagcccatgatatcggcctgggcgcggatggcaaccagacggttgatgtgctcgctgatgggaacgaggaccttgccagccatgtggccgcacttctttgtgccgggagcctgatcttcgatgtggataccggcggcaccacgctcaacaaacagcttggtcagcttcatgacagctgtcagaccgccgtgtccggtgtcggcatcagcaatgatgggtcgcaggtagtcgacgttggcaacgtttcctcgctggcctgcaggagtagtaacgcgctcctcgcgctgtttacggtcatggaagagctgtgccatgaacagctggttcaccttgcgaggcacggtgtcctggagtacttgtcagtatgcggtccatttaaataccgtcagtatattcaacgtaccatgggataatcggccagatcgggcgagggctcgtcggttgacgaagcggtagacgagctctgccatccagagacgtagatagtatcgaggaacttgcacatttgagtgatcatggtaggctcaagacagccgtaggtgaagctggcctgcttgttctattcgtgaggtgtatagttagtatctatcggatcatgggtccatatttcccaactaaacttacctggaagtttgattcgacaataccccagagcttctttgcttgcacattggacgggtaatcgatcttcaggttaccacgttttgccacaatctgctctgctgtgaaagggcgtttggtgtagcgccaccgagagtccttccaccagctctgaacggcctgaacctctgccgcatactggcggtcctcgtcttcgtgcagacccatgattttttggtataatacagggaaagggtaaagaaatatagtcagtatgtatatccaggcgtgcaagaagtgtgtcacgtctgttccaatactccaattatggaactgtagaaaaggaaaaggataacgatgaagagaggagaggctatagttaaaaaagaagaagcgatcacaagccagaaaagcctgtacttatttaatattcaaatgcgtcacagtcggtaaactctcggctcaccgggagtcagaccaataagtcccccaatgcctaggtattttctccatatcccagaagtcgtttcacgggcaaagcgctccgaaaggcggaaggcgggtacaactgggctcgggagagaggatccaggctctgatgatcctcggtctaatgggacctccctttgccactgctgacttgcatcttccatgtcacagtgatcggtatcttactggaatgtacggagtagaggatatataatcccaggtctctttaacccatttcttattgcttgttcaagtcggtactcagtgtttaatgttcgatgtcaaaatgtatggaaaatggcggatgacgtcgaagacacatgctattattgtgacaatacgagacatatcgtaacgtaattttcacgtgcatcaactgcaataaatgttcggagcatgttcatgttgggaatagtttcatataagctacatatgtagaaatcctgggcgatactaagtcgtacatactacagtttagtcaaggaaatcatgtccattcggagagaaacactgctcagaagcaacattccaataaatgtctgcctgagtcatccttgccgtattgtcatgccccggtattcgaccggtccccaccaatcctcgagatgcttcatatatcgagtattcaaagtttctatgtaatggtttcggatatttccggacattttcggatgtttatatttctgatttgctatctatgccacatggacgtagatccaagttgtatagtcttgaagcgactagctatatccatggatatatatacagtccatcatcctcatatgccgtacactacactatcatatatgcggaaccgcactcattacctacacgaagccagatcggaacagatgacactctcaaagtacctgcacatgcatctatctaattgcaggaggtccactctgctcaaggaaaaatgactcagagcggccctacaagttggacctcggcacaactgagctctgccagactaaccgcatacagcgccgataggactagtagatcaggaactatacgatgacagtctagaacaaaagcacgaagcaatgtagttttagaccccgcgcaagacatttatagaaaacatttttggtaccatccttgcacttataccccgaagaatcgcgtgtctcttccatggatgcccaggtgaacattagatatcagataagcttaacgagacaacgaggtccacacacccatacccatacagtatttcttcagccgcagagcccacgataactacctcgggaaaacaagggatccccagctccgcacccgtctattatctcgatacggaaacccctgcctacaatgacgccttcgggatctctgaaatgcggtcttttttcggtcggggacgcgttgctctgccgaggcatccatcggcttattttcgctttggttcgggttgtggtgctggggtatactccagacagtcaagctcatttggcggggtgttcatttactacaagtataatagatcgtggcatgcgcaacaaaatgaatctgctgacatggtgaagcgaggatacacattgtcgtccattcttttttctcattttattgatcttcttttggcaaaggaaaagactgagtgcaaagtaacaaccaaaaaccagcgctagacagtaaacactgcctgatgatgtccatttcctgctcacttctacgtggattttccattctccccttggctcattccgcccctacacccccagcaacattcttgactgtaacgcaacgacagcacaaattcaatcaatatgcgtcctgggcaacgactgccttgtggtacgtctcatacggagtgatagttcccaacgagcgtctcatgtgcgcattgagaatctccagcccgtagacgtaactggcattcacccatccaaatctacaatcgaattagcaaggtgttcatggtattcacgacaggaaaaagaacaaaaacgtacccttcacgcggagctcccttgaagtccacgccctgatttccatactcagcatcgacccggtgcggatcaataggacgagtgacatcatatttctccacgacaacaccattgaagtcaacaaaggcctttgtgatcatgtaaacccatttgtatgccagtcgctccgcatcttcctgatagccatagcggaggaaggcggtccaggcaagcatctgctgcggagcccagccatatgggtagtcccactgccgattgggtcgatccaaacccactgcgccgcgagactcttcagtgccagagaccaagccgccaaacgcctcgaagcggggcagggccttttccatcattatagctgcttgcccgggggacgcgagaccagcccacatcgcccagaaggtcgtggcggtttcgtatccctggcgctccttcttgaccgtgtcgtagtcgaagtacatgcccttctcctggtcccagaggagctggtccatgcgctgcttgcgcttacgcgcacgccggtcccagactgcagaggactccgtttcgatgtcctgggtttggggtgtgcggaactccgctgggatggggagtttgtcgttgaagtgcacacggatgatccgtgcaatgtcgacttcgtatttgtacagcagggagttgaggtcgactgtggcgaggttcccacacactccctccaagcggtagctggtgtcgtggccggactcgcggacagctcggtcgtgcatgaagtactcgtcgagtttgggctcaacgatagtcctagcattgtatgccctgacaaattcttcaaaggtcattccgtgcttctgggcgtatggggtgagaatgtgcacgaagtgagagggctccgtctctgggggaacgccccaaccttcggggcgatacctcgacagaccggattctggatcgaggcgaggcgcggtaacccagacgctgttgtactccttgatagcagcgaggacagaattgcgcaggaactcctttgaatccggctcggttttgattctttcgtagacacgcagtgccatgtcggttaggaagggcggttgcgagcgagtgaggtagtaagatcgattcgcgttgaggatcttgccatagtgcttgatctcgaaacagaaattgattaccatgcccttagcgaggtcgacgcggtcgctgacgagcagtcccaaagattccatgtagctatcccaaccgtacagctcgttgaaccgaccacccggcacgacgaacggcacaccaactaaatcagtctccccggtcgagtcattgggcttcttctccatggccagtgcaagtaggccgggcttgtcgttgagccccatcacataatcgggtgtaattgcagctggcagcatctgcacatcaagacgcagctcggggtggtctttcgcgatttgctcgtagtattcaaactgcgtttgagcacccggcgggatatagatccgaggtcgtggatctgccgtccaatctttggggtctcgacctgccacttcaatgttggagccatcgatacgtctcgtgagggcattccaaaaggagtttttgattagacgagacagtcgcgctactgggttctcgcttagtcgtgcttcgtcaaggataatgtgcttgcgaccgtagtctttggcaattgtaagctcttggaggaggttcgagagcatgtatgtgccccgcacatcaacgcgcttatgtccggatgatgccgcagtcccgaccgagatgacctacaacaattagcagtcgtcctggatgtttggctccatgctccatcaagcataccttaggccccaagtcctcgatggtaatctgcatattctggtccgtatcttcttgcttcaagagagtcgcaagcgtctcctccacctcaatgaggaacttccgaggttgtcccgatgcctcatctgtccgatgttgtcagctcctgcactaaccgcatatccgacatatttataacaagcataccatgactaccgcgtcgagatggcaaggttccaaagaattggttgacgtcttcgcggctgtagtcgttcaaaccctgtagatcccagtcaaagtaagcttgctgtaccttctaccgcggggtaccgtccaagcgttgtggctgcttaccactgagaatgcacgtcttctcgacttgaactttttgatattgtcatccttgccatagtagacatctggattggagaaaggatctgtagagctggaaccagaccgggtatgcccatctgacgagctcatggtctgtgtggcggaagaagaattgagggcacaatttaaaatccgaatgtgcgttacgcaaggatgcgtccacaccgactattcccggcagtcgaaaaaaacttaaagcagcaagtacagatgctccaatgggcccaatatatgatgacctgggcaattgcactctgtactccgagggtactcgcgatctgagcagaaaagtcgggggagtcttggtctgagtaagacagtttcggattcagatgatatgttgaagctttaggatggataggagatggtagtgatagagaacttgaaacagaaatatgttatgaacctggcagaggtggaaagggaatgacggcattcacattgatgatgtcgccgctccacttatgttgccgctccagcgctgataagcctttagataacaactctagaaacaaatcgaagacgaggccctgggatgcgaatacaagtaaatataagtactgcaaatctttgctagaagcagtgattcaaaccaagactgttgtgacttggacgaatatggtagccagccattcattggaatgttggggattctgccctgaatcccagtaaccataagcttaaagtcctatctaacaaagcaacatcaataatgcttgtgctaacacagctatttacgaatattcaaagccaaactgttcatacaattgttcacaacttggcagagacggcgcttccgccgtcgagcgtgatagtcgcgccgttcacaaacgaaccggcacggctactcaagaacaagcaagccccggccacgtcctgtggggttccaatgcgacccagaggcacaccagccttgatagtgtcaccgaatgacttcaaggtagcggccatcatcttactttcaaagggaccacaagccaaggtgttagagctgcaaaccgaatcagtctcccaatacatcaaaaaggcgaagcgaagcatagtagatatacttacgtgacgtttcgcttgcccaggtggttggcgagcactcggctcaagtggtgcagaccggccttgctggaactgtatgcgaatgtctcgagcgagggcacacgcagcccatcaatgctgccaatattgatgatgcgagaaggatcctccggtgtagccgccttctccaggagcggtgtgacgagctgggtcaggtcgaagacgcggtggaggttgagggtgaggactcgcgtgaaggcctcggaggggtattcatcgtagggagcgccccagttcgagccggagttgttgacgaggacgtggagctctagaagaaaaggcatgttgttagaataatatagccctccattggatgtgatgtcttactgtcctcgcgcttgcccagttcctcggccagcttcttcacgtcctcaagcttatagaaattggccggaatggcatgagctttgcccttgcccagggcgttgagctctttggctgcttgctcacaggcctttgcatcacgggatgagatgtagacagtggcaccgtttgttacgtagccctctgagatcatgcgaccgatgcctttagctccgccggtgaccagcaccactttgccctataggcgcgttagaatggtcggagaggtggagcatgtagctatctaaccttgacattgaaaagacttgtggaatccattgtaaaactgtgatttagattgattataccaaaatgatagaagacaagaggctacatttgttagatctgtccctcgtacccccattacactccatacccgaggccgacggggccgagattacttgatgaaccagccgaggcacgcggacctggaatatctttgtaccgatatacatacgctagtcctctttggtactcgacttagggctgcatcgtcagggtttcgcggggtctctggtcaaggtgttttggctattttcgttcagcatatacccccagtacaatagacttgttgaatttgtctttcgtttcgttataccacaatggaagagcttttgtcaaaacaccgcaaagagcaaaaggatctccaagggcggatcacgcaaaagaaaaagtccgccaccaagaaaacccgcaaaggagtcaacgatgaatgtgaacaattacagcgcgatctgtccgagaaacagcaggccgagatcgcgaagttaaatggagatcccactgaaaacctcgaaggcctcagcttggaagatgatcaaccggcagatgacgaggacttgaaacaggacaaacccgccgaggagccacagcaagcagaaccaacagcccaatccaccccggagccttcctctgcatcccaaccaaaaaagccaaatcgtcaaaaggcccgtctcgcgcggcgtgcagctgagcaagccgcccagtcagccgccgcagcagaagaagccacaacgcaaacaaactacagaggcgacgaacaagaggttatggatgctgtgttcaagaaactgggtctgaaggaaatagaagtgaccccggatgggcactgcctctactcagcagttgccaaacagctcgacgagtccggactcggtttgcggccggacccaagccgaatcatcctccagcccgccacacagtcacgcatcgacacagtcgcctccccgcaacacgacggctaccgagctgttcgagctgtgacggcggatttcattatggaacataaagaggatttcgaggcgttcatggaagagcccctggagtcatatactcggaagatcaaattgactgccgagtggggagggcagttggagctgcaggcgattgcccgagcatacggagtggaaatcaacgttgtacagaaggatgggcgaatggagaagatcgaatctggcgacaacgacagcttcgacgaggatgagaagcggaaacgcattatctggctcgcttactaccgccacacatacggactcggcgaacactacaatgccctcgtgaagaagtcttaagctactagatcaacgcaatctcatttctgcctcggccttttcagttcagacctgactgtgcaattgcagatctattttttatcttggtctttgctaggtggttttcggcttttcggcggatctagttacgacgacgccagatcgagactcggtcgtggatcaccccattctcgccctggcctatttcgtgcgtgcgctctggcttccagtatgccactctttccaggccgtctttgctcggtgcccgtagaggttcgtgcttgacgacgccattgtcataggggacttcttcgccggggtggctcaggtgtgccatatacgcttccgacgaagaagaatatggggggcctccggattggggatccttgtgacgggggaactcgaggcagatcaagttgcccgctggcgaaggggacagaagctgggtctgtcgcagcgcccatttgggtcgcattgacggatccagggcacagaagaactgcataatggttagcatgagaacagttgacatagaaacatgagatatagataaaagaagacacaatattcttgttatcggatcccgtggatgtaattccattgcgatggatctcacagcgtagacagacatccaaacagcaacgcaagggacaaaaagaatccataccgtgtaatcatagataatatcaaatccgttcaggggaaccccaatcttttgcaaccaagcatcatcgaaaaagtcaccctgaacccaagtaacctttcccgtgccgacagtctgatcccggacgcgataccaactggcattatcagtctcttccttcttgcatgcctcaatcgcagcagcgctatactcgaggccataagcatcgaagccgaagcttgccagcaagaggacatccacccctctcccgcagccaggaacgagagccttccgcctgtacgactggccctgtgcatcagtggcgagaggcgcgccaattgtcgggcgctgcttgacaagcgtgtccccaagggcgggattggggaatccccggtcccagggcagattgtcacccttgtcccagagggcggcccagccatcgacgtatttgtcgcccttgtattgggagaggtgggcctgcaccccctttgagtcgatgttggtttgcattgtgatggttatggttttgatctttgatgtggtttcacggggtctttaattgttcctgggtgtcaaccttgagggatgcggtggagctcaccgtctttatgtcatgttgccctcggggaatgatccattgcccagtctaccaggcttattaatcacctccttgcatccccggagcccttctaaggttctgagatccacctgggttgaaggtatatgatccggtggcgtacgaagacgtttctggatgttcgcggtatactctctgttttgacgacagatctgtagcaagtacacccaccacatatcacaacacgtggatttgtcctacattataattccggcaggcccatcacctaccacaggcgtacgtggtatgtaggtgatggacacttggtggacacttggtagacctgctgcttatgatactaatagtaggactctggggtatttattgagacggcgaaggtaacatccggggaagcagggatattaagcgaaagccaagacctcttaagtatattgcgactgttggattttaaatactttaagtcgtccaaaaagtttcatattctgttctatcatagattttgttcatcgaacatctagaccacttcaagtctttaatctctctctcgggatggggccccttcagaatttgccgacggaagaccggcacactcgcgctcaacgatgactggctctataagccggctcgcgtctttataggatagggaatgtacactagagccctgcccaggtggaatgcgagtgataactaatattattagtacactcggtcgattattagcacactcggtcgccgtcggtgcttgtcggtccagaaaatctccaaatgcattctggtctttcgtctctctcacttttatttctcctgggacatccaacgttaatatttaacattgtaaaaacatacctgctgatctgatatatccaagggggatagatcgacaatctttggaaggcgcccaagttcaggtacctgcagggctcccacagggttgatcttctgttaaaactcaagactttaccctttgtaaagctttatgcgccttattttttttggattcaaatttattctatgctcaattggcaaaagtcgaatttcccccttattaatatacatccaatatgcatgagaaacctgagcccgacgacatcgtcgcatcctcggacactggagaacatccggcaatcataaccgaaccaaaaccggaggttgacgataatcactctctatcgggtacctccagcaataccgtcgatgaagaacatgacccagagaatcctcctcgcctagaacgccaactgacggagcttggtcctccggtcaaggtcgcccgactcaagcgccgaggcttgttcgggcagttggcattggtatcggaggttgaaaatccgaagacatatactcgcgggatgaaatggttcatcacatttgtcgttgcccttgccggagccacagcaccaatgggcagcgcgatctttcttcgtgagtctccaatacaaattgggtattcctctgattatatctaatctgaccaatcttctatcagcttcactatcacaagtaaccaaggagttgaatacgacaaccaccatcactaatctgtcgatcgcgttgtatatgctagctatgtcgatattcccattgtggtggtcatcattcagcgagcgacttgggcgacggaccatctatttaacttcttttgctctcttcgtggtcttcaactgcctttgtgccatctcagattctatcgcaatgctggttgtaatgcgaatgttgagtggtggcgcctctgcttctgtccaggcggttggtgctggcaccatcgccgatctctgggaacccagggagcgaggacgggccatgggtatcttctatctaggtccgttgtgtggacccttgtttgcacccattatcggcggtgtcctagctcagcgctggggatggcggagcactatgtggttcctctcggcatttggtgctgtcactctcatctttatcttattcgctcttcccgagacgttgaccgtgcaaaagcctgtgctggctgaacttgaggacgaagatccagccatcagccgcccgctgagtcgagtctcgtcgcagcaggttgttcggtccactgcaaagtggctcaagacgatgaaaatggtcttcattgatccgctcaaaatcattctctacctccgattcctccccgtccttctcactgtgtattatgcaagtgtcgccttcggttccctctatgtcctgaatatcagcgttgagcataccttcgcggaggcaccatacaacttctccaccatcatcgttggtttattgtacattccaaactcgctgggctacatggtgaccagtatatttggaggcaaatggatggacagcatcatgcaacgggaggcaaagaaagcaaatcggtacgacgagaaaggcagactggaattacgccccgaagaccgaatgcgtgagaatgcatggcttggagccttcctgtatccggccgccctgatctggtatggttggacggcggagaagggggtgttctggcttgtcccggtatgtcaactctcagcccagacccccaaggcacatcagtacaacgtgaacccactaactccgatctggtagatgattgccaacttcttctttggtatgggctctatgctcattttcagtatggtgaccaccatgctcacggaattcatgccgaaaaagtcctcggaaggcgtagctctcaacaactttatgcgaaacatcttctcctgcgtcggttccgtcgtcactgccccaatcatcaacggcatcggcaatgggtggctcttcaccatcctcggcctcgtcagtttcgcaagtagctccgtcatcttcctgatgagagtcaacggtcccaagtggagaaagactttggatgcagaaatgcggacatgagttgcttttgctccgtattactaggttgtattttatctctagcgtttgagcatatatttacattaattttagaaggtggtaagggcctggcctgccaacatgtacacaattggtgtcggtacatgtgacgacctgtctctgtttttcacatacgtctcaccggcacaaaattccatacctgactctgtctcttcatctacacaccatgtactaagccgctctccggtccttctatgctcttcttatctatgtatccccagcaggagccgattatgtcgcctctgttcttggcgacgtaagaccttgatagtctgatctattggcaaccctaaaagagggacgctatatgtaagagcaaacccgtggactgatgtttttagactgctctttctagtgtcttttaggacaggtccttcgattaccaagtgcaattgattgcatacgatgaggctagcgatgtttctctttacctacgtccataggtgtgcctcagtctttacttggtacggagtacggagtatagaaaagcgatatagatctgagtaatactacatgtataactcacctgcatgaaaagaagtgaggcagccaatcagagcttcatcacgccatgttcttgactagccagcacttctagcgaacattcgatgcatccgcaataaggggaaggggagatcgccgacgggataacggagtagaggggtctatgtgctggagtcaccagggtccacaacttgtgcacgaagtgctctttcaaacgatatcgcaaacctctccattggtgaccaaacaatctccccgatgccaatgttttcttttttcccctttttccttcttttttcgcatgggttattctctagcagatccgatgccggcaacatccctcaactatactacaaatgactcgacctatccattcgctagttgcaatctcaaatatcagacatcggatgaaagtctattaacctttagacctctcctctccgatcggcatactccttacaagtgcataagtggcaaaggaacatcttgcccaaagaaaagagctacgtttatgcccatctaccccaaacacagagtccaagtgtccaggagtccaacgtatccagaaacgaccacaagaacccaagtatcctggcccaattctgagaatagaaacaaagcaaccaattgtatttacaaaatccgatgaattcatctcgaggtcaattgctaaccacacgcaacacggcatggatgctcggcccgctgcatggagttgggtacatacatacatagccccatctggcaatttggctgaggacttgtatcaggaagtacaacatatcggggaatggcacgaaaaatcagcaccgagatgacgcgctagaaaagagaaaagtggcctgggcatgcatgcagctcgttttagactcgagtgttggcttttgtacttatctatacccttaggtacattaggtcgaattgaacacatatgccattttgaaagaagaggatcctagtgacgaagctgttgtaagacgacaaatcaatcagatagccgtggggtctgttagtggactccgtacgcggaccaagttggatgcaggaattggcggacgtgttggtttaggagtggccggtattgacgcgaataccgcatatgatcggctgtactccgtacaccgttataggcggaattggaatgtgagaatatcgaagttggcagggagagtttgacgtccaaatccaatgcgcaatatcacctgaccccgagaaactctgtgttcggcgaccttttcgtttacttcagacattgatgtctaattgatgcagtccacgatatctaactgcatattacatcaccattccaactgctgactcccttacagtcgagtgtcacaagaataatgtccttggacaatactctgaagtgtcggtgtcgagagtggagattccactatccacgactccatcagctccataacaacttcatccccaaccaccccgtttcgcttttccagtttgtttctatgaataaggcagaattttgctggaagtcccattccgatatttgctccccctaataccggatccctttcgaggttaattgccctggtctctccaccgatgtatttcgtacgcctgcatcctatttgccgccgttaccgggacacgttgggcagaaatgggtctgcatcacctctgcgtcgcccatcgatttcgctactgaaacattgccttcgtggctctgtgtacatctacgaaagttccctcggcccaattcagttctattctcgtcgcaatatgtgtctatgtgtagtatccaggcccaaaaacaaaccaaaaacaaggggaaaaaaatcaagtcaatccaattcaatccaattcaatccaattcattcggtggcatccaccccacttctacagacccagtttctccatgctcctgcagcactacctttcctatcttgaccgatgtgccctccgatccccaatcccgtatcgccatttactgcttggtgctgcagctattcctgcaggtggggttcgtactgctcccacccggccctaaccaagcaccggacctcactaaccaccctggaaatggagacccgacgaccgacgtggcccaatgacaattgactccatcgggcagttcattggtgacgttcaagggcccaagaccgtaatgcactttgttgtcgtcccatccgaccgcattgaaggcgaactattatacgctgcctcaccatgactgtccaatgcgacctctgtgtcaccagagaaacaagcatatccttcctttcccttttagtactctaatacatgaggtaccctacccagtttcacactcctcaattgtccatcttttgtatcttttgttcctcgatttcccttgtcgccccatacttttccgtgcatcgtacccgacaagccggcttgtcaatttcccattgagccggttctcgtcacatcacgcgccagttagcctcgcccaggctttcgatatatgatacgtcattgaccggggataatggccggtaagaagaagaataagaagaacaataaaaacaacaatcgccctcccgccggttctgcaccaccccctgaactagagaacaaagacctcgtcgaccctgccccggacccggcggcagccgctgttgaggatgacttacaagtatgccgacctccctcagttctcatatgcatcggtccaacgtcaatattcgacctttgactatgagactaaatctttccaattctaccctgtcacctattcaacgaccgatctgaccgagggccaaaaccaggacaacaaggagcccaccaccgacgaaccggagaaggaccctgcctctgaagatccccctgccgctgagccaagtggcgatgacagcccgcccactgagactacaggtaagtgcatgtttctgaagatgatggggtttatcatcgaggaatccatgttttaagttttgtacttgatattaacatacaatactcagattctgcggaggctgccccagaggctaaggatgagggcaaggatgagccagcgccagacgcagagaatccagacgaagcttccaaggaggccgccgtagaggacgcgaaacccgcggaggatgcaaaacctgacgacggtgcagcgcccgaaggtgaagccaagcctgagggggaggcgaaacctgaagaggaagccaaacctgaagaggaagtcaagcctgaagaggaagccaaacctgaagaggaagccaagcctgaagaggatccaaagcccgaaggcgacccaaagcctgaagatgaatctaaacccgaaggcggtgcggcgcccgatgacagcgcagagcctaaagaggaatcaaagcctgaagaagacgcaaaacccgaggggaaagaagatgctccagcaggcgaaggcgcgaaagaaggtgataatggcaacaacggtcagtggccacacttacattagatcttacgaagctgacagtatgtagatgaagatttcccagattttgatctagacgttgatcctgaggcagtagcagccgagaaagaggctgctgctaaagcggccgctgaagacgccctagagaatggggaagatgcactgaaggccgatgaagcacctgcagaggaaccagcagcgcccgagccacccgcggaggagccaaagccagaggaaaagccagcgggcaagaagaaaaagaagggcaagaagggcaaggccgccaaggcaaccgaagagccagcacccgaaccggaaccagccgccgagccagaaccagagccagctgccgagcccgagccagctgccgagcccgagcctgcagcggagccagagcctgcagcggagccagagcctgcagcggagccagagcctgcagcggagccagagcctgcagcggagccagagcctgcagcggagccagagcctgcagcggagccagagcctgcagcggagccagagccaacgcccgaaccagctgccgaagcagcggcggagcccgaaccagaaccagcagtagaatcaacaccggaaccagctgccgaaacagcgccggtgcctgaagctgagcctgaaaagcccgcagataatcctcctgataccccaaccccagaagagccagcagcacctgagccacccgcggaggagccaaagccagaggaaaagccagcgggcaagaagaaaaagaagggcaagaagggcaaaaccgccaaggcagccgagtcagagccagcgccagagccagcagcagagccaacgcccgaaccacctgccgaaacagcggcggagccagtgccagaaacaacaccagaaccagaaccagccaccgaagcagcgccggagcctgaagcatcacctgcagcagaagaaaaggtgcccgagaaaactgtcaaggagcaagagccggaagctacgccagttgaggaaacaccggctgccgaacccgaagctgctgcggaggacaaggtggaagctgtagagcccgaaccagtcgaggaaacccccaaagaggcacccgtcgaagaaagcactccagtcgagcctgcccccgaacctgctaccgagcccgctcctgagcctgccgctgaacccgcccccgaaccagctgctgaaccagctcctgaacctgcagctgagcctgccgctgaacccgctcccgagccagctgttgaaccagctgctgaacctgctcccgagtctgctgctgaagctcccgctgagcctactcccgaaccagctgctgaaccagctcctgagcctgcttccgaacctgctgctgagcctgcccccgaacctgctaccgagcccgctcccgaaccagctgctgaacctgctcctgagcccgcccctgagcctgccgctgaacccgctcctgaaccagctgctgaacccgcccctgagcctgccgctgaacctgctcccgaaccagctgctgaaccagctcctgagcctgccgctgaaccagcccctgagcctgccgctgagcctgctcccgagcctgctcccgaacctgccgctgagcccgctcccgaacctgctcccgaaccagctgctgaaccagctcctgagcctgccgctgaaccagcccctgagcctgccgctgagcctgctcccgagcctgctcctgaacctgccgctgagcccgctcccgaacctgccgctgagtccgctcccgaaccagctgctgaacccgctcctgaacctgccgctgagcctattcccgaacctgctgctgaacccgctcctgagcctgccgctgagccagttcccgaagctcccgaggcacctcgcgctgaagaggaagcagcgactgaagatgcccccgctgccacagatcatgtagaggagcctcctaccccggaaccagcggctgaggcacctgctcctgccccggtggaagaagcacccgctgccgagacacccacagaagctgtagcagaaccggaggttgtacccgatgaggcgccaaaggaaattacagaggaaacacctgctgaccagccaacgcccgaagagccagctcctgtcgaagcagtcccagctgagactccggcagctgaggaatccccggctcctccggtagttccggaggaggccccagctgagacaccagaggttgatgcagctgcagtcccagccgagactccaacaccgggagaggcacagcctgagacaccgccagaggagccaactcacgagcccgaggctgccagagccctccccgccgaagacccacctgctgagccagtcgctatcaccgctagcgacgaagtggcgcccgacgaactagtaccacccccagctgacccccagcctgaggtggagatgatcgacgctgggcctctgggcgaaagcgcagaagcagccgcagcccgccactcccgacgccgcagaaagcgtagctcgccgatcgagggtgagcgtcgacactccaagacatcgtctgaaggccgccgggatcaactccagcgccagaagagcgagcgaggcatcctcaccaaccgctgggcgaaggcactggaagaagcgcgacgccaacatgacgagaaaactcaattggaacgaaaacagcgcgctctcgccgaggaacgagcgcgcagtggcattcctgcccccgagaaactgaagcgctcgaagagctcgtccaaggagaaggtgagggagaaggagagggcaatggaaccagaaatggatgtcgaagtcatcgaatccagatccaaacgccgcacctctgacactccctcgagccaacctctcgaacgagcccgctcaaccaggacctcttcatcgaagcaggtatcaacaccgatacccacgcccaaaccccgcgccttcctgcggtacatgacagaaggcaaatcggataccaatgggcctttgctgcgtctgaatgccactaaggcttcgccgcccattgaaagaccacgccggtcatcgacaagtcatagcagtggcagccgtcacggtcgtgcggagcatgaagagcgacagtctgatggtcggtctagtggatcacggtcaagacgcgaagaggagcttcctcgcatcgagcgcactgagcgtgctgagcgcagtgagcgcgttgagcgcactgagagtaggagattgcgacgctcgtcgacggctgagcatggtcgatccagggaggagaggaaggagagagagaaggtgagggagagggagagggagaaggtaagggaaagggagagggagagggagcgtgtgcgtgagcacgaacgtgaacgggaaatagagggagatatggagagagagagggagaagaggcctgagggctcctcccggcgttccagggagacaagagaggcgcgccatcatcgtcgccacagacgcgaggaatctcctccccgagaggagtcgaagctaaagagtctttggagagcgattgctgcccattgagaccatagagattgttaatttgcgtttgtgatttgctttcatttcgaccttgtcttttactttaaccggggggtttgcggttggacagaatgatctatatgtgacagtgtatgcttgatgaatttgtgcttgcattggggagcgaatcattgcaggagtacttgaatttttttttttgccagatttgattcaatatgcatcaacttgacaaggactttgattttggagatcgtcatgattcgcatatttcttatagcttatttgaggctatctcgaagccatcgtagtatctctctgtttttgactccccggtacaatcccatcattcgtgtcatatttcatgctgcatgtcatttaatgcaaagtcggtatcttggccagcatcagtcgtgaaaagcaggaaagctgcccgatcaccaaatgccacatgcaacatgcaaagccctaatccagacagccagaataagcaaaataaatcaagtctgctcgatcttcgccggtatcactctagaacaccacccacaccaaccacgatacaaacctttctcctctctctcaagataattccccgtctccctctcatcctcatactcaacaacacaagcaccaacattaaccctcttcttagacttgtgcttaacaacaccacccaacccaataacttcctgcctgaaatacccaggctcctcgtcatcatggctatccgtcgggacacctgccccctcgtgaccaaacgacggaggagctggacttgcagtgcgacttgtatcactcccagatccagacccctcatcagcctcacagtcaacctcgagctcaatctcctgcgcagcaagacagctctcaccacgcccgcacttaacgccctggcagccttcaccaatgccagtacctagcccgccgccgaggtacgtgctgtagcgcgtgcgccacgtccagacacgacggtatgtcgtatcattactgcgcagagccattccacactgcgtgcacagccagacagcttcctcgcaattacaggggctgcgcgcgaacgcaacagccgcgacgctattctcgtcccaccggtcgggggcttgcgggtctgaggttgtgtaggagaggtgggaggagagtggcgctttgccgcagggtcggcagaggcggcggatgcggtttttcagggctggttgggacgggggtttgattgtgcagttctgcaagaagctgggtttagcgacttggtagtcgttgctaagtgtggatgtggcttactctgcatacaaccttggcgcagcgtcgacattcgcccaccatgtcgcgcgcgcacttgctaaccttcccccgggtcatacgggtctgctcgccgctgggacggcttaggagtcgtatgactgatttgacgctgtctgggaggacagagccactgtctagcatctctgctagggtttcgatgtattcattctcgcatcggagggtctctttcactaattggtggcggaacggtgccaagttcacgtggaactggcgacatgtgctcgatagagcatagagagtattcaggtcgatggcgcgagcgatttctttgacgatgctatgggtgaacgtgttagcgggatctgaatcttattcgccggttgttgacagtcaaatacatacggataacagctcaaagccgctgagaatccattccgattggcgtttacaatctcatcggtcgttttattgagcgaagaaggcgatgtgggtaattcggccgggtccgacgcgatggggtccatcaaagggaatggcttctccaagtgtgccgatccgtcagcaaatgcatcgtcgaggtcgacaaacaccaccatgctgctccatcagaggcctttctcaggatcagtttcatcagataagatcggggggtctttatagtgccccgttcatcagcctaatgaagttaaatggtccgtgggtgggatgatggcggaggggctaattgccgctccgacgaccggggcggtgagttacgtgatctttctctccagccctggaggctatttgactgttggacttgtctttttcagaaatgagatttggtgctttggatgtggataaaagcaatgatcaaacgcgatacgtcatactccctcacagccaacctcggccagaataccggggagggccacgctcaactccgagatatagccctggagatacacataactaatgtcctttgtttcctaatcaggcaagagacgcccttttataccctacagctgtggatcctccaggccctttcattttggtctatactattcctatctattcctatcacatcaaagagtccagggaatggagttctataacatatgcgaagtacatagtggaccccaaacggaggatgtccgggtatttatctaggtaattaaaagttggagtcatccacgggttgattgaactttctccaatcaaagttaccgcctgagttaccgaggaaccttctttcctttcatccttggggatattagtgggggtagataagcctttgatatccccagttcccccctcatatattatctatcccccactctcccacttctccatccaaagctccaaagccatgccgctcaacgccaaagccgtatacgcccgctccaatgcggactatgtcccatttcccagtcgacggagtaccgtccacagcaccaagggcatcgtatcatgcacccaaccactagccgctgctgcgggtcataagatcctgagccagggtggaaacgcagcggtatgcatcctgttcaattatatctatcgcatccagctatactgactttaatactcttgtccaggatgccgctgttgctgtcggtaagcctcgcctctatttccataaccacagcaggaaacaataaaactgatcgcatgcgtctacagccgctggactcaacatgactgagcctggctccaccggcatcggaggtgatatgttctgtctcttctataatgccaagacgaagaaggtgcatgcgctcaatggttctggtcggtatcctgggaatgccagcttggagaaaatccgcaaggacctcggtttggcccctggtgagccagggaaaatgcccatgttgaatgcgctatctgtaactacgcctggagcagctgcgggatgggtggatacagttgagaagtttggtagtggtaagttatcgctcgagcagattctacagcctgctattgagctgggggaagagggattcccggtgtcggagctttcgtctcggcttgtaagtatccaatttccgatcatctccaatcttaatcgcactatgagctaacccccgcagtggaatggctccgagcaaaatatccgcaatgcatctcctaacttccgtgagatgttgaaggtagatccttcagccaaagatggcgtgcgacccccgcttccaggcgagatcatgaagaatcccactctagcgaaaactttccgtgcgatcgcctcggagggcaagaaaggattctaccagggtcggatcgcagaatccattgtcaaggtggtgcaagatcagggtggctacctgtcacttgaggatctagcctatcatgccgagatcgggacgcaggaagtcgacgcaatttcactcaagttcactggccaagacatcgtttcaaaatgcacacccggcacagatggtgaagccaaccaaggcgttgagctctgggaacacccaccaaacggccaaggcatcgtggcgctaatggcactcggcatcatggaggaactcgagaaatcaggcaagatccccaagttcaccgaggcccagcataactcagccgaatacctccacgccgtgattgagagtctgcgcatcgccttcgccgatgcggcctggtgggtcacagacccagacgtggaacgcgtgccttcgcagggcctactcgaccccgcgtacctcgcagagcgggcgaagctgttcacacccgaacgcgcagcggatatcatggaccacggtagtccggcgcacaaccactgcgacacggtatacttcgcagtgacggacggcgagggcaacggcatttctttcatcaacagtaactatgaggggttcggaacggctatcatccctgccggctgtggcttcacgctgcagaaccgtggtgccaatttctcgctgcaggaaggccaccccgatgtcctggctccgaacaagcggccataccacactatcatcccggcccttatcactaatgttgcggatggctccttacactccgtttacggtgtcatgggtggctttatgcagccgcagggccatgtacaggttctgctcaacatgcttgctttcgggtatcatccccaggcagcgctggattcgccgcgcttctgtctcgcagcgccgactgacgagagtacggaccgcactgtgttggttgaggagggtattagtgatgctgctgtggagggactgcgtcgtcttggtcacaagattgaggtgttgactggttggaagcgagctatgtttggtcgcggccagatcatccgttcgtaccatgatgatgggaagctggtttatgctgcaggcagtgatcttcgaggcgatgggatggcgttccctttgctgtagagcgacgaagatccaaattaaattgccgactatgttgtaattgcatagtcacaggtgatcagccatcaggaagtccaggcttttgttggctcttcccttttcttaaatcgtcttcatagctctttaccggcgtacaaccaatgaatatgcagccttctgcccatgttacagctaggctcagataaaggtgattcgttccaatacaatcggttttaaaaaataagaaagaaagaaagaagaagaaatattataccatatcagcgtccgacgggttatgtacctgtaaaacctaggaaagcgatgtgacagatgcatcgatataaggatatatcgggcaaaccctagaggtgatagagatcaagccaattccccgattcctgcagaagtcaattccataagccttgacgcaatctttgcactggaattcgctacaactgtgccagtgtaaacggagtagtctccatcactagaccactccatccttgcactccttaccaacaacgacgcaccgatcccaatccagaatccccaaagcaaagagcaaacgcacatcatcactcatgcaggcaggtggtctgaacagaagccaaggcctcagaaagccgcgtgactcctcgaacccctgatcgacacgccagactaaggtgctaacgtgccccacagcagaatcctcgacagctcgaggctccgtgctccgtactccgtagaggtaaaaagcaataaagctcctgacattgatcaccaaaagtcaatgtcaacatctcagcattgatacatcagcatgctgataaatcaaacgattaccaaccctcaaacacccagtctcgaagcaagctatccatggatatactccatactatttgtccgtaaaacccaattctagatcgaagcccggaaacccaccatgacaacgccccatagaatccacagcgaattccaaatcctaaacgctccatttcgaaagattttactcgcaagacctggaaaatcagtctagcgggaaaaatagggtggggagaacaaggtggggagagcaggttcgtataccccattgaggatagcccgggtgccgcgttgtttactccgtgtccagtgttatcaaatgggtttcggggcgtccgggataaagtggagatagttgaggcttttattcaagggctagagtctacggagtacaacataggaccccagagctacagccgagccataattgtggacatttgctggttgggattgtaacctggaccttgagaggttggaatcgagattttgatatccttaggggacggttttgggcaaggctgtaccttccaaatgtccaggcgtgggcttcccaggttccaaggtttgttccgctttacataagccaaagtttatgcccaggtgcccaggtggttttccatggaagccagttccgctcgggtcggagatcgctttatctcgtttgagtccatggtgtgacggacaagggagccatgggtgttgatttaatagagttgaactttatatcgggagtttttatggatttggtttgtcaattcatcgaatttggagctatacatttatataaaatgctgggggtatggtgggatcatccagaaacgaaagttgcagtacatacgagtggcctgcatgggtataaatgatatagtggacaagaatagtaaaaaagaagaaaagaaaagaaaaagacaatcatgatcgtgtcgtcagaaaaaaaacataaagaaacacatcaaacaaaggaaaaagaaacatcaaatctagttccccagttgggatgcaagaccaaagaattaaccgatatcgggaggtgcttatcttctttgtatttggaagaattgtgggcgctggaagcgaccgcgaccggtggatccggagtccaggtggtcacactccggacaacggagacaggtggagcgacctgctaatgacgattgagccatttgtatgtttgtagggagtcgagaccctctctaaggcacaccagtggcccctcgggattcccgttggacccacagtatgttttcttttgccatggagcccaaggttttccagggctgttgggtcatccgcgatggtttcgtagaggcaaatgcctgggtggtcgtatagtcatgagattcggccgtctatgatcaatatatattggaatttgaccaaagaccttccatgatcttttcacatcccccagctcacgggctggaactggtgcatggagtggacctggtcctcgtagggaaggcagtctgcactggaccacgaaggagaggggtagtggcactgaacgggctggagatgtattagcgaatatttatacaaataatagcgaagaaaactcactggctggatcatattctcccccatagacatgggaactagatgcgacgaaggcacgccggcatcagcatcccagcggaggggagtgtgcatctgaagcggggacgaagtgacttcgccatttaggatactctttgggtactggtcgaggacagacacagacgcggaagagatggagctagagtgggaaggaagagagaaagtcgcatccgacagaggcgaggggcaagtatctgcgggggaagagtagaatgggctgtcatcaacggactcggggagctggctatggaaagccgggcggggttgtaggggcaagtcgacgccgctccacattagtgagcagtcgttgttggccaagtccgggtgaatgccaggagccacgagtgagccgatggacatggagtgtgtatgggaggttgcagtcaatggcattccatggtccattgacatacagcgcgggacgccggactcattcacgatgggattttgcttgttggatgcccatgaggactgctctgattgcgattcgagttcgctgccattattgttagtatgcgccgtctcgccaaaggtttcccgtggtactcactgtctctccatgtggcgcacaagtagatcagcgcggtggaatgccttcttgcatccttgtgttgagcagcggtacgaggcctcggggttgtggttcaactcatggcgtcttcggtgctcagccctggtgaagacctgcaacggagtcagtttgtttgatccgagaggtgtatatggttgcgccgacctttccgcatgctgggtattggcaggcatgtacacgctttcccttcttggccttgctaatgcgacgggtggtcggtgtataagtgacgggcacattcgcatctgcaggagagcttggacggatgttgttcttccggcccatgttggatttggaagcaagttgttcaggttctggtgaagaggagacggaaggcgagttcaagacagagacgatatggtttggactgatgcgctcagtggatccgcgggtcatgattggtaaaggagaaagagtagataggtagggaggaatgggatgtaagatatagatatgaggcgggcctggattgttcaggtagaagaatcctgaaagatgatatgaagaagagaggagggtggactgatatagagggaacgatatgctcctacagatctaccagattaataaacttcgaggaaattggaggaaattaatatgtgctaaaataaataaaataaaataaaataaacaataataataataataataataataataataataataataataatgaattaatccctaaaatattcatgctaataataatgacaacaaaaataaatccaacataaggctaactaaggctaactgagattagattcaggtaaaaacagcacgggcgtggaggcgatgatcgctctgcgggatgatcagagcataagccgtactaaatttacacaggggcatgcatgagagccacgagtgcggctgaggcgcactttccagtccgcccttagatgatccataacaagaaattggccgttagctgttggttcgagatagcgcaatttcgctaccgtagtcacggaatgggcgatattactatggattatttaacgtctattaccttagttatgtgaagtggatagtgctttactccataagaagaaaaaaatttaatcgaattccaaatcatgtcccgtccaaattttttgaacataaaaattccccattgaacgggaaacgaagccgcttaaatggctctgatattccaaatcccgcgttgaacgtggagcagctttcacaatcgagggcttcggtccaagctcccacgggatacaacgggtttgccccatcggaaaagctaaggtgcattatcagtggggcgtgcgctggtttaggcaactcgcaggaccagaatgggaagcactattcccaatatggtatgtaggaggctcacaacagggctgcatggatactactgattggctcgaaaattttctgaatcaggaatacagttcgaacataagatctacattccgacactctctatattctttcttgcttccattcatagcaaaagtatcaatttgggatatcttggatatcatgggtaggatctcaggaagaacgggagatccggtggatccttggattcaaagcctcaaccaaacttgaaatcgaccaaaccgaactagcccgaccccactaaaccaataagagaaagggcaaaaaatcaaaaatcgaaaatcaagaaaaggcagagtcagcctagtggcccggtgcccttggctggcgtgtcttggcattttgttttccaaggtttgcccttttgtttcagtgcgccgatccttgacttttgagggggaaacggataccccaaactccgggcaccgacctcaaaaggtctcggttcgtccgggggaaaccattcggtggaacggttactatattatctactatatcctactatatggtgcatacaactattgatttacgtactgtgaagtatatgaatccctatacataccatcttttcccggggccccaacaccaagtacctaaattgctctgcacgcgggccccatgcgacattgcataaccggagaatagccccggtcgccctcgtggcagagcaagcatcaggagccaaatgccagaaaacatctcactgcattaatacactatctatagcaagattaaggtccttattttacatcgtactactgcatcgctaaaacacgctatgtacactatccctgcttcccctaatttctggaaagaatccttcgttctactaagcacatctctaaaaggaccaaggaacaatagactaaaataacaaacgggaatgcacactatgcaggggactttcgaaggatgattcaaggccacaatatgtcccgctctgacgcctcgctatcgcaattgtttatctatcagacaaatcacgggcactaggtgggtggctgtggggagggagtggaatcggttctcgcacgatccaccatctgcaatctgcaatactccgtgtgttgccgcagattctgaggatccacgatgagaatcttgatctggactgcaaggcattcttgcagggttcttgaaacgagagatggaaacccagaaacagaaagagtcacatatgcagtgtgcgggaactaccacagccctcttttttcccagcttccaagtttagacacgcataatgcatctacccttgtctatacaagccaagaccgggtctggtccatgactgatcggctggtgcggctagggtcagagagcgggcttagcctggggtttggacggagtaccgatgaaattaaagcttttttttttgtctctggttttcccttgcccggacaactattacatttgatcgtcgtttgctatcatagtcctgttgtgcataatcttgatctaaaccacttctggtgtagagagacaccatattaatatggaagtgtataattgtggggcaatcatggtccttctaagagggatttcaatgcccgggatctggttcgcggtatttgccccctgtgcttgcaatttcccacatggcttgtggtttattattgttaagcctccttccgcttctgcttattagtgtctgtgtggatcatagagactgcttcaaatattacggatgaaggggcgatatcgccaactcatctctttttgatattagtttttaatagaatatagcgtttgttatttcgtagtgctgggttagacgatgttgatgcggacttggatattgagtatactgctgagccaccgggaatatactctctactatgaatctatattaagtctataacaccttccttgttaagatgaagattactctgcatgatcatatcgattctggcatagtacagatgtcgacggcaagacggataagccttgcgcctacaatagcaatgggtgcatgaagagcatgaagaagtgcataggagtgagggtggtgatcaatatacaacgagtcagggagctcgattggtgttggttctttttttagatgcttactctgtacaacacgggacatgccagtctgtgcacgctagacctgaagtagtaaacgctctctccccaattcgttcctgatcgacaaaatcgccaaactactcccaaactggcatggagttgcaaaggtcttggcattcgaattaaattaaattaaaaatcagagctatcaacgtgacccccatgctcctaaccctttaaagtatgtgcgggattcctacataggcaggtgcccaagatcgacatgggcgcaccccagagttgatccaggacttttcgagtacaccccttcaaaaggtttggtttacctctctggatgactttgatgtcgacaaaataaataaatagaaaagacatacaacatagggagaagagtaaaataaaaataaaataaaataaaataattggccgatttaggaatatccaacatataacggcgtatatgcggcctttcattgtccccacccggcccccccttaagctttagaggctctttggttccgaccagttcactttggccaacaggtggcccttccgggtctctttcgtccccagattaatcggtgagcctcctttttagcctctcgtgatggtggatctccggattttcaggatggttaagcatagaagaaggaggtggtaaagttgcggataaggctgatggcggtgcgtatatatgctccttgattctgcatatttagcagtaatataggaggaatgtgctctcatagattgttccatggaaggtgaaatctcacctcagatcccgtggaatctgctctgattggtggaagttgtattatttctgattcgccgaatgagataacccgctctcggtctgggcactccctgcaaaggctcttaacttgagtaatatcgcgcaatcggttactaaagtgagaaacgacactaaactcttcgctacacatactcaaattagtgaaaacaggatatctgatattaatgcaaaatacatacccctggtccgggacagatagccgtgaccgtttaccacggaattgcggctattcctcgggattaaccgaaaaaaggaggtatcggctatacccgaggaggtttaggtagcttttctctcagtaaatttaccccttactttgtatatctcagataccttccaaggtcagcaaagctcaacccattagggcgaaatcaaggtcgaaattaattgcgcccacgtggaaaatgccctagaatgcgctaaactgccagaaagcgacgattgcaagcggtgctgtacattatactaatcgggttagttcaggtccactctggttataccgttatccccgccctgaggatactcaggtatgaccttcttgatcttccaaggttccaaggttgtttactgctgtcttgtttcagtcgacatctccttctttccatggttagctcatatctagcacgtggttagtagcgccacaatcgtcacctcgatccttgtctctcggatgtaacgggcatatacgtggctcgatgcaccacaagatgtacatattaatgtgtttagtactttgtttcctgccaagcatggcctagagagtcgagaatgtgatcggtctgcgctcaaggtccatcgctggtgatgagtgagccatttgtattcccagcgggttcccctgcattgactaaagcaaaccatcctgcccaggtggatacagcatacttgcagggatcattgaagagattaaccgaatttacggagtatggcgactcgtaatgagtcagtcacctgtacacttgtcacttccgacaatccctttatacaggtcccgagatctaccatacctacccggtgctatatcatagcatgttgtatacctacctaggtaggtatacatcgccatcagtaatctgcctatgcttcctgttcctggggtacttccccacactgactcagatcgcaagcttccactaaaaaagaaaaggaaagcaagagagtcgaggtccgaaccctacaaagtggagcaatgatttattcaatacaagaatgcgtcctgattctctcgttctctccttttacaggaaaaacttcggcgtaagcagagttctccatgcattttcctacgtcgtcttttgcaggtatacgctaatggcgtaaaccccctgcatgctaaggttacgtttcagatagccccgtcgatcaggccatgccatgtgcccaccttttgcaaggcagatttcgaggtgagcaccgttgcctacttctggtaacgatcgttgttttaagtcataacactactatcatggatacaacatgcctacaacatgcatgctctcggaaaattatgtatagcggattgcaacactaatttatttctccataatatacttgtcttggctttgggctttgttatttgctaagaagaagaaaaaaaaacccctttcttcgagttcttatagcaaatcacagccatgtactcagtacccgtcactgccgaatccaacaaggacattgccattaattttaaatccacttcatttcctcccagcttgcagggggcttgcagcaaggatcatgatccttgtaacccatgtggctgcattacaccaaaacggcaacgaaatgagagctaatttagggcacgtaaccatgtaggcactactgcagcatatgcatgcagagagctagctattttcaggtaaacatactgcgtacgaagcattgactgtttactcaaacgggaataagtgactctcgcgtttcatgtccgtgaccgtgtccgtgtccgcggacactccgcggacaaccctgccagtcagtagatcaggaaggtgctcgtgctgatctaggctgtttttggtgtctttgctgtctttatacttatttataaccattatcctcgatataattagtctgcatagtactacttacttgggatttatccgatcggctcggtaaaatcgcaaatcatatcctagttatcctcgagcagggaagaattaacgcagattattaccaggtacctttgggtcctaataatcgactggatacctcccaagaacccgacatcggggattcgggttttgcagggatttggctatagagcacaataaaggggtgtaaacaagctaatctttggacaattatttactccagatattgcagtgtcacagtatggggaatagctagatctacaatactgtacacgaatcatagccgattttcccgattaccccttttctttttcatttccctatcatgcctttcttgctatacggagagttgtaacttccgacatgcgacggagctaattccttcgctctaatccgttccagaccacatggccaaaactgtgggcctcttgtagatcactcaacgggtgtcgcaaagtgctccccagtttgaagttcctacaacatacatgtatctagcctacttaggtaggttgtttagagagacactaagctcaatccagctatatactcttttgagacttcccagcatactggttattagcctgacttctagaatgctacctcacaaaactaattaaggaacattacaccgtctttttgcagacggcaggacccctctgcagccaacaacaacagcttaagccaattggcgtggaattactctgcctagatgcattcgagtttaggtccatggccaagggctcaatgatagatcaccatacgcatgacatcatgcacgcccggtgttctgggcgtcagcgtgcatctgcctgatcatgcttgttgacgctgttggttctactgcgatttctattggcttgatgctctgcagcctgaggatgatcgtgtaacaattgtccgattgggagggctggaaataggcatggctagttgggttctcgttgccctccagaccgtttctcccttttgtctttgttattgtatgttgtatattgatcgacgccagttcgagtccatgtcatttccggcaatctcggcaataaactccggaatctccgggactttatatttgacgacatgggtcatgagatgacaaatgagaccataatgcgagtcaagtagatccaaattatcccgttggaccagtctgtcctatcctattcagactagtgtgtccaatatcatatctttagcgggtaatctccagcaccagcggggcatgctgcaatccttcgggcctcccggcaagggctaatattttgatcagcacacctgatttttcagctgtaacaaacagactactagactagcttggctggtctcctccaatctctttttcctgttttccttctgctgcaggtcttgatcgtcgctggattagcgttgcatggagccatgtggttgttaagtccggctcaagtccggtttaggtccgcctagccgctgttggacctggcgttgatctacttgggctgtcgatccggagtatgttatgtttggggggattcggcggctatggggtttgggggtgagaggctgtgccgacatggactagttggttggctactattggggctggccatctggcagtcgtgatccatgtattctttgcgaggtctctgtgtgtatctttcctaatgtcatgaaaagtgagggaatgtaatgttaggcatcagagaagggtagttggaggttgtgctcttgttctgggtttggtggtataaccaaagagggaggccgaattggtttgcttgatacccaatcatctctagtccaagagtgatgggccttcgaggtacgggatactcttcgcatcacttcggatagacctttccttcatcccttgaggagttgtggataacctcgttttgcatggaaaggacgaaccttggaaggagcgttcttcgctctctgttcattccaaaacaacatccatgagacggccaccatggcctcatctgatgtgttcaatgatgttagattgatataccttttgtttgcctcgtcgtgactgaggcttttcattcttacatcttcttgttctctcttcttccctcgccctttgcatcgtgcttcatcttccccatccatcttccccatcggtcgaaggcctttccttcttataccatgcctccaaaaagaggtgaagcggcaaatggcccccaaacccccgcaaagacagcggaatgtactgacaacactcctaatacgcctgcggcaagccatggtgttcacgcgaaacttctcgaatacaccgatccagcagaaacgggccggtgcgtccattgattcagggtagcagtgcgtgactgggacgagaacgagtggctcgaccctcaagataacctgcattcgtgatgccgactcaagcgttgtcaaacgatgttgccatgcccacgacaaatgtaaactcgtgagtattccttagtgtttccgtgtcgtccagtcgtgtgttatactcattcaaacgctctattttagctctatgaaggtatcaggggcctcggtttgagctgcacgcattactggagtgggtaatggagttttggatcaatgaggaatccgaattcggacaaaccgacgatgctagccttgttcacgatatagagaaggttcacgccgctgcagtggctgtgcgagatctcagcgccggtgttgatcgtctcatcaagttccatggcagcgctcacaacttagtcggcgagcttggtggaagtgccgtgagtctacctcatcttttgggctttcgtgcacgatttcaccatggctgactttccgaggggtttaggcagataaagttaaagcttcatacgctcagtactgttcttctcggcgtggtttcttgcagttccgcctccgcttggtccccgtagcgatggtactccgcaccccaagcgcatccaattcgagcattgtgctcgccaataccgtcgtcttgatatccattctgactttggtctgccttggtatatgagcgtgcgctcgttcaaggaaattatcgaggagttgattcgggacaaattcgatcacagtgatgccaacatcgtcgcctggtataccactatgctggccacattccccttcaccatccctctgctatgggcacaggtaacttgtctcgttatcttcttgtgttcttttcgggcgatactcgtgattcgttgcctccctttatgcttttcatgtcgttttgcacggttcctccattttgtgttcggtgacgcatgaatcttgggaatcctatctgatattgagctctcatgctgaatcaacttgaaattttgcctccgtttcttgtttataactttcgggtgtttttattatctccttgttcatgtgaatacccaaagtgtaaaagtgatgcgtgacttgttacaaggttggctgcaataaaccttccgatggacctggctgaacacgccaatatatagttgaccttcgcctgtttgattcacaggctaataactatcagtaggcctatagaaaatgatcaatctcagactcttagaacagatgatcaatgcaaggtttctggtcgaataaaactaaagcacccagaggtgccagagatatatatggactgatggcagacccagcttggaccaactcaaccactatcagtttactttacaagcaaatgatcacaatctgatgtgcatatccattctcacattaagtacagctgattgatctcgcctatttacagccatccctgaatcagaccaagccggagcgaattgcagaatgcgagaagctcattataggaccgatagacgaagacctgactggaaacaggaaaagagaccacaaaggggaaaaagtaaaaaggaatcacgtaaaaggaatggtctgctcgtgacaaggaagatgtcgagcaatgatggagccgaaatagaaagaaacgccttttcggacacgtctctatatccagagacttcactataattgaacaagatacaatgatcggatcttcggcagagaaggctggtgatgcggttgatttcccaatgtaaatcctaagagatgatgatcatgaagtagggcaacgtcgtcttgatatggagtcacggagcgcatcgacaaaaagcaattcagccccagggctcaagagacagcaggtcaccagctggaccacaccgactgggtcaggccatatgccgttcggatatcgtcactccgctgaataatccgactagaaagataatgacaacaggatagggaagctctcataaagtagtttgattgacgcagagatgaggttgggtttcgctaataccaagtggaaagaaagagaaggagcataaatgttcgaaaaatgggtattgttttagcgatcaggattcgtcacctgtatcttaaatcagcttggaaacaatatcaacagatggtgtgcgtgcttacctgcaagatccggcgagagaagtcatggtcatcatcgatgctgccattgctttggcggcgctgagccatgtagtcgccatcgaaccgagaatcggacatcgagggcgggcccgaggtacggccatagccgccagtggcaccacccgcagcaccggccttgttcttcttggatcgccaccagaagaacgcagcaccgcagagagcagcgaatcccaccactcctacaacgactccggccgcgattgcggcagtattcttgctcttcgcggcctctgccttcatatcttcgtcggaggccttcgcactagcctcaggtgtcacggtctctgtcgtttcaccggaagtactggaagtagtggaggcagacccgtcggttttcgtcgtggttttgctgtcggtactgctcttggttgtggtggactcggagtcggagtatgtagggacatcatcttctaaacctgtggtatagacagagtagaagccgggaccaccacctattcgagattattgttagcaagtcaattctctcagagccacggatggacgtgtagacatacacatatcgtcgggccagccactgcaggacttgctgcatttgtcatttgaaaccttggcactggctggtggtagtgtgttaccacacacacagtcagatcctcctgtcaaagcaaatgccgcatagtccgagtctttggcgcagtggtccagacaccatccagaactctggtacgtccagctcgtggacttcccgtatccaggaatgctggaatagcaaccctggagcgtccctaatggtgagccacgaggaagcaccttgaagtctgttgcaacggccgaggtggctgccattagcacaccggacaccacgagggcgccttgagtgtggaaaagcatgatgtgttgggagagtagggaagtcgagtatcgaaaacagcgcggaaagaaaacaccgctggactcagtcgcaggggtgattgacgaaggactggggacggcctgcgtaaccctcaagaacttctctttgaatgtatgtcggtagacgttgtttgttctgaaaccgcccaccgcgttggtactgaattatcgctcagatactcagggcgtgtgtaacgaggaaagcgagattttggggtcggaaaaaggagtgaaaggaaagtgatcgttgtgttgacgggtactcgagtatgtggtcgagttgaggtttacccctctacaattcgggagagagtgagcgaccgtgagcttcgaagcagttcagctgatgacccccaaataaaaggagtaaacgagcgaagaaatcgggttgtaggtatgtaacgaatgtgtgcgaaggggatttaggaagatcaggaggaaagagaagtgtgacggataatggatcccttgggaaagggactgttaaggggtcgtgttccccagaggaggtatgaggtacttgaaatacgggggggaggccctggtgcacccgagtaccgggtactttccgcgcaggtctttcacgggtggtttcaatattgtttgctccttgtatggtacagtatcaggtatacaaacaaaggcttatccaatgatatgtcgggttatctttaggtaatcaggcacccgtccaggttaaccagggtactgtgtcagatcagtttcccgttttggtcagacacggcagctgatggagtccttgggcatgccgctagtctgctttgggcgccaagcggtgatgatgagactctcattgtgtgaacctcgtccaatattcaatatcgaggtattacccagtgctccatactttattactccgtacatggactgatgaaagatcgtccttgccacatgaagaagacccttgatgacgactttgttgtttgacccctcaaaaattgtacaactcacagcagaattagtcctcggctaaggacgctttgttctgccttagtgtctactctcattgatctgctctctactccgtatacatgactggtcaacacacgccacgtcctttgtggctggcaagtgcatccttggctgatggtcgaggggaaattcagatctccgtttgataaattgcgaccgaattttgttgaaagaaaaagaaataccatttcgtcatggaacgggctcatctcccaggcggagccaatttcaatacctcatacaagcgctaagaacctccacatttgttacagagtactcggtacaacatgaaacctgaaggatttagtataggatttaaccttatgttttgagtatgttgtagtcgcaccctacaacatatactccaacctcactctcttcttgattcctgttgatgcccctttccgattttccaaattatttccatgggtaatgagcggccactcccgggaccgtaccttggaaattatgatcggtctttctacgtaccgttcctgtaacaaaagtaacaaaacaaaccctgcttcagccacaaaaaacagcgcactgtggctcagatctacatacaactcacctcctagttattatctgcaagtctatagatggcctacgagggctgtgttcaaccttatattttgtattttgtattttgtattttgtattttgtaccttggaatttttaggcttcaagtgtcttgttcgtggcttgactgcataatagtatgtggtattattagcactgcctactacaacatatgtattctcatacatataatatccctgaaaatatcggaggttatttaatctaaccacgttaccatcatgcgagaattactgactttgagacatccacaggccctttactctgtactgaatcgagagataaagttactggtaaatatgcggccaagtacgctctagatattccgtaaccattgtgtataatatatcgactgtgccttgcagatctagtcccttgcaacacattctgaaccacggactcgattgttattgcaaatgcccgaccatttcatgtaagcctcatggtcaatgagttcagatcctttcaacggtcaacataactgcctgcgcaggtaagcatttcgacgcggacacaccacgttcgatagttgtagccaatttaacgtcatcaaccttattctcgtctaaaagtcacccacggccatataactcacagagcaaacaataagttctcaatgaagccgatcttccgacagtgagacatactaatcatccagtctgatccgtcatccgagtatcgcccgccagagcctccaaaaagacagtatgcacaggcaataccggtccgtatatattgtacagtactcgtacacaggaaaatgcgtcaacaagcacacctgcctagacctgtccaaacggggagagagatattccgggatcagtggcgtccactagaccggttggattctccacctgccaaaggaatcatgtagaaacacagtcccccttgccttgccggtgtacacagcgagaaacagaattgaagaagaaaaaggtctattcaggctgcttgcgtctttcgtatttactgggatatctcaacgagagcgaacaccagttcaacttgatcaaactgtgggtaagaaaggtgttcgaaactggatatcaaagtgaaacttgtgtctcggtctagaccctgcgtgtctggccaagaatcaacaacattctaattttaaatggtaaaaattctgatttcacctgtgacttcttcgcttattctatccatattctagatcatgcggaaggtccggcttggtgaattacctcggaagagagtatcatttcgcttagggatataactctgaacatggacatctccgaaggtagctgggtactcgacgcagcccagattttatttcaacattgaatattaataatgacaatgcagaaaaaggacatattattaagctcaacacttggaagctacgttaaaagaagcatgaacacagtaacaccatcaaacaccctcagacctcagatataagagtaacccgaacatgtccccaccaacctagccggaacccgtcgctggacaccatcctgatctacctcctctgagtagaaggaacaccatccacgagcacaaacatagtgaatcccatgtggcacctccttctcggttccggctatttgcctacgagtgtacctgccgcatcggcagcgcgggttggccggacttatcccgcgttgatcatcaaagcagatgaatcgatcacatagatcgcatatgtaatatgggcgacctgcattgccattcgggttgttgccgttgactatctgccttataccgtgttcgtagcacgtcgggcatctggggggttcgagtgtagttatggtcatcgctgctgtcgttatgggcttggtccttacagtggctggcttagatgtggcttggtgggttggtagtagggttttctgtgctagctcaccttcgctttcattccatgcgctcaacgattgtttgtgtcgaagtcctcgttgacagctcagactgtgagaatgcctagccaagtggtcataatgacgatcgttataggtcaatattgcgcgtgcttgtatatgctatcagattggaagaatatccgtggttcacattacgaccactcgacaatgagtggtacgtccgtgaacccaacacgtactgcaacaaccatccacaccaaatcctaggagccatactcttcgagaagagactgtcgtcgtttcacgtgccgacgtttccctgtctgaatagccaccttgtacctacttcattcccttcattctaggttgggtcactggacgataccttaagtcaacgttgattctgatctttggactcccgatttcctatgctcaaggtcacttgaagtcgcaaccagagacgaagaactgcctggggattctaatgaatgaaaagaagaatacaaagcattcgtagacccagctaatgaaggaaagcaaaggaactgaaggcctacaagatatcatggagccatctggcaaacacaaagatgtcaaaaaggtaccatgtagtgaccagcactgcttatgtagttgttgaagaccgacgacaatcagcagcttgctgttgaaagctgcaatttccagcatgtcgaccttattagccacaatcatgcaatcaaacccctatgcggaagccacaatgactataatcaatctatgcaattgaatttcaattaaacatccttatttaagtgcatcgagatcatgctatgccttgcgtacaaacaacggccctctcgatatttattttcagtcgtccaagttgagagagacaacagactcaggcatttttttcccaacagtaaatgcgtggccaaatttgggttgagctcatggtttagggatgtgtatcgtcttgctgaccatcatacaaccatgcagaacgaacatcaggaccacaggatggaactcgaaaatggtaccttctgcgaagagtcctagtgggatgttctcgtgcgtccagctttgagagacccagtaggccataatggcagcgattgacagagtggtaggaatgggtgtgccttcgaagtacttggattttccggtcttatccttgggcagtacggctacagtcacgttgaaccgagcgaggcgggtcagaccgcagagaacgaagaagctgaggaagacgtgatcaagcgaggtccggataccaagagcgaatgcggcagcggcgggggcgagaccgaaggagatctagggaatatgagcgttagcgataactcattgtatttacttcacaggagcgattacgaggtcagctagcgagtcgagctcttgccccatgagagacgatttcttgcgccatcttgccactttcccatccataaagtcgaagaacagaccgaaaggcataaatgcgagggcagcccagatggcaccatattcagttgggtctccgaggcagtagcgcatggacgaaaagaccgacatgactgctcaacatgttagacgcggattggaaaaaggttgggaaattgagcttgcctccacagaaacctaagatgcagagttagcgagtcaattcaaacaaaacttcaggatattacgatctcttaccattcatctcagtaatcagatcagcaagatgcaaggccctgttgagtgttaggctgaaccgagagcaaaggagcgcgggaagcacgagactgacttcaccatgctgaaatgaccatgatccgaggaaagtagcattttctgcttctcctggcctgtaaattataagcttcattgcccatgaacgaccaaaggaaacttgaacgtacctccgtcactcgaaggtgggacaccgctggaggaatcgctcgatgccatggtcgatgtccgacgagacatgctcaaatggatatcagatttgaagaaaatctatggcaaaaggataggctgtctcaataagatatgaaaaacggcaagattgggtaagaagaataaaaatgcagtcaatcctgctggggagtgttgacggacgcacagattccctgagcggtcaacgtcatttcaactgcaggcaggcagaggcggtgcagctgcgccacacacactagccacatccaaaccaaatgtccgagccgattatccccgaatttctaaacgagttgctatgtttgaatatttaatatgcaattgcaagttctggaaaataagaaaataacagaaacatttttgactggtgatattctacagcctgcagccagtgaagttgcaattgcgcagatgcacaagaagacggaaagatattcctgaaaaagctcccagatcccccaaaacgccataaacagacagtacattggatcgatcagtagccgcggccacggaagccaccgccaccacgaggggcgccacgaccacgagagaagccgccgccgccgccgccgcgggagaaaccaccaccaccacgaccaccgccgaagccaccacggccacggggagcaccaccacggccaccgcgaccacggggagcaccgaatccaccacgaccacgggcagcggcaccaccggcgcgcttgggcttagcagctcctgggggaggcttgggcttggggaggaacctaagaggtgagttagtcagaagtggacgaataagcaggatagcgaaacgtacttctcgagagggagcagcttatctccgccaatgtagaccttgtcaccagccttgaaggaagtagcgacaataccgtcttggggcttcacggtgaagtagacctggttgatgggaccgagaatttcgtcgaccttgccgatttgggtctataaagaaccagttaggtcatgaacttgtatatgatattgatttggtggagtagttgcgcaccttgttctccaggtagataggagcgttgaagtaaggaatcttggggttgactgattcgcagaccatctcaccctcgcaggagtgcatcacggaacccaactctatcggcatatcagcgacacaaatcaaatatagtaggattcagaagaataattacccagaacctgcgctggggggccgaatgactgctggaagcctccgcgacctgcaacaaaaaaatttcgttagctccttttacatcctcgcaccgcatccacgttggaaaattctcaccaccacggccaccaccgaaacctccccggttggcaccagaagcattaccacgaccacggaaagacattttgtggtgataagggtgattgacttgtacaaagctggagaagttttcgcttggtggaaactcgaagcggtaaagtgtcggctaagggcagaaccagcacgtgacctgtgcttcaccgccctcacgaagagtcaattttcccctccacgcggagtatacatgtttaaagttcctgtccacatttttattcctttgcgccattgcttcaagggtttttaatgatggcatctgaacccccccaggagctccccgtgcggcccgccgctgaagcgcaggccaaaaacgcatctgaagctgccactgcccctccaaaagatgcgaatgcgaaatccaagcaggccccgagccccgatactctccccgagttcataatcgagcgaaacaagctcttcgaggaactctggcaacaatacctggaggagaccaggacccgtcctcacccagagatcaacgttacccttgacattggcgacggcaaccccccctcctcggtccctgccaaagccttcgagaccactcctggatctttcctccgcgatgtgcccaaggacctaagtgccaatattgttattgccaaggttaatggagaactgtgggatttgaaccgacccctagagaaggactgcagtgtgctccttgtgcccttcagcaaccccgaggcccgtgaaacgttctttcattcttctgcccacgtgcttggcttagccagcgaatgcgagtacggatgtcttctttcccacggtccgcctacccctcagggtttcttctacgatatggccatgcctgacgggtatgttatcttatcacctacccttcaccattgcgccaatgctaatatatgtgggaaacagacgggttgtccgtgaggccgactggaaagcgcttgacatcagagcgtcgcgtagcttcaaggagaagcaaagcttcgaccgattggaagtttccaaggagaacctcaaaaagatgttcgcatacagcaaatacaagctgcactacattgataagctcgtcaccggcgaaagcagcaccgtctatcgtaacggtacccttgtcgatctctgccgaggccctcatattcagaacactggcaagatcaaggccttcaagatcatgcaggtaagcgtcgctagttgacctcttgaccgaggaagacacatactaacttttcttaccagaactcatcggcctacttccttggcgatcagtccaacgactctctgcagcgtattcgtggtgttgccttccccgacaagaagctgatggctgagcacttgaagtttttggaggaagctgaaaagcggaaccatctgagaattggcaaggagcaagagctgttcttcttcgatgaggcgtcccccggttgcccattcctccttcctaacggaaccaagatcttcaaccagctccagtcccttctgcgtagtgaataccgcaagcgaggctaccaggaggtccagacccccaatatgtacgatgtcggcgtctggaaaacctccggacactgggcccactacaaggatgatatgttcaagttggatgtcgagaagcgcgagtgggctctgaagcccatgaactgccctgggcacttcattctgttcggccaccgtgaacgtagttaccgtgagcttcctatgcgtattgcagacttcggtgttctgcaccgaaatgaggcttcgggtgccctgagtggtctgacacgctgtcgaaaatttcaacaagatgattgtcatgtcgttctagcctcccatcaaattatgtctgaagtggagggcctgttcgatttcttgcagtccatctatgggctgtttggcttcaccttcaagttgaagctgtccacccgcccagagaagtatatgggtgcgttggagacctgggaccacgccgaggaccagctcaagaaggccttgaccaagtttaagggtgatgattggaccattaatgagggtgacggtgccttctacggacccaagatcgatatcactattgccgatgccatccagcgtgagttccagtgcgccaccattcagctcgattaccaggccccgatcaacttcaaaatggagtacatgaccaaagagcagagccaggcggagcagcccaaggagggtgagaccaagggcgacgagcttgcccccggccgtgctcgtcctgttgtcatccaccgtgctatcattggcagtttcgagcgattcctgggtatcttgatcgagcacttcggtggcaagtggcccttctggatcagccctcgccagatcctcattgttccagttatgcctgccgtgaatgactatgccgaggagctacagaagatcttgcagggtgacaagctgagtgtcgatatcgatatcagcggtaacaccatgcagaagaagatccgcactggccagctggctcagtacaacttcatcttcgttgtcggcgcatcggagcgtgaaacgaggtctgtcaacgtccgcaatcgcgatgatcctgccactcagaagcagggcgtgatggtgccccttgaggaggtgcggatcaagctcaaggctctgcgtaaggagcgtcggttggagaacgctctgtaggggatatagtcgttacagatttatggaaaatgaaatgaagtacacgcagatatgctactgattccactaaatatccattgtcccatagcatacttacatgtgtaatatagtagagtaatcggggtcttggtttattttaattacgtatgtaatgatctgtttaagcctactgccgttgcttctaaccttccctttccgtatttctgcacttttggccgctgttgcccacagtagagctacgagccctactttttcgtctaccctatagaggctaaggagttttcatcataaacgtaacttcatatagtggagactttgtaagtttgaccctatagaaagaaacaaagctttaggatcattttggggtgtatacagtgataacattgtgggcatgtgccatcctctgatcgctcaggtttctttaaccattctaccacttgttcgaggtgagctatgatcgcccgaataagtctttgtcaaaagagctcatctttgctacttgtagtggtcttatcagggatatatatggaacgtattatttgacaagataagtggaagataagctatgggcgggtctatacgggtgtataccagtgtttccctgaacgcgaggagactacatatactgttttgcttccttgggatacacttttaagcccactacgggcttttgcttttctcttctgttattggccgttcactctgaaaacgctgtctgcttctctctacatacaagtatctgcattgttcctgcgagttccctttaaggcgtatacgggacctcggtatgtaggccctcctaggaacactggtttctagtagtcatggaaccattctaggaaaccatgctaggtccattcataacactcagtctcttctcattcgactttctaaaactcatcattagtaactgcgatgtcgtgcctaggttgctgtgttccatccccactcgtcagttccgggctttattgctttaccttagctagccgtttctatggctgcctatatatttatggatccagcctcgttacactgcttcccattccttagcccagttgtccttggtttcaggcgggctaggagctgattacttatcttctcttgctcatttctgtccttccgttaggggcctggcgacgtccagctctcctagccgtagtccgtaaggatcctcttgatcctcttcatgtgtcctggcttcatccaaacccggtaagtattatataacctgggtcgttatatcttttgtcgagatgaggatctgggctaccgcggaatgcgtttgtagggtttctcaccgctcataacatgacccttccaaggtactttctatttctcttttggcgtacgtttttagattgctggatagctacatgcattcctctcttcctgcccagagacctcccattgccctgttactttatgatcatttaggcctttgtttgctagcagattcggtgtttcgtttgctgtttggaaattacatacgtagtacttgcgtttgatagattgaatcaacgtaacttctcctctcgcttggtagctctatgcgtagcctccaaacctcgcgcattcatccttttagacctcgtaggcatcatcttgctggtcggtccgtcgctctctcactctctctgccgagctgtcaacacatttgcaccttcatctattcatctacacttgctcatccattcatttcaggtctcataggcatcattctgctgctcgcttctgctgggtgctcgacacattcatacccaaccactttcaccaacatgccaaaggggcgaaagagcttcccatgtccgcgcgcgaagagcgttggatgtaaaaagaagttttcctcgagaagatatgcaatcacgcatgctcagagggtccacgataacatcgcatggccgtgcccgcgcgcagaggagcttgattgcgacaagacgttcggctcgaaatctgatgcaaaagaacatgctaagagagagcacgaccaaacaaaatcgccctgtcccttggcagaagaggagggatgtactttgcaattttgtaacaaacagtcggctgaaaagcacgcagagaacatccatggcgatcagggaactcggccaaagtttccttgcccacaggcagaggctgcaaactgtaagaagaagtttgcctcgatatcgagtgcaaacaagcatgccaggcaggtgcatgatcaagtgaaatggccatgtcccatggcagaagagaagggatgtcgtatggaattttccaccaagggggcagccagcgtacatgcggagagggctcatggccccaagagagagtcgaaaggatttccttgcccacgcgcagatgaggtcaattgcaaaaggagattcacaacgaaacaaaacgcaaatcggcatgcagaccaggcgcacaagaaaaccaaatggccttgtccctcggcagaagaggtgggatgtactttgcaatttaccgaccaacacaatgccaaacgtcacgcaaagagtgctcatggtgataactataagccaactcggaaagagtttccttgtccacgcgcgcaggacgaaaaatgcgtgaaactgttcagttccccagacagcgcgcggacacattcgaagatggcacatggtaaagctgaatcagatgagacattcatcgcggcgtggcctatgatatcgccacctagtcccctcagagacgtggacgggaatataatacctggatgggacaagcttccaaacccgttctttctggaggacaggcggacttgggcgtgcccacacccaggttgtaccacaacatacttgaccaatgttggggtaaaataccactacttggccatccatctgaacgctcgttggccctgtgcgtctgcgaagacactgggttgtaacagaatgttctcgtcaatctacgacgccaaaaaacacgcagatgagcattttcctaggtgcaagtggatctgcacgtacgatcgatgccttgctcaaatgcagggtaggaagatgtcacgagttaccgccttaacccattataacgcgcatcttcgacgaggacagttccaaaagggggaatacaaacttgaaaaggtacgtaacagtgaatgaaagaacaaatgagcatcacctgatgggaacaataggtctttgctgcggtctccgatgggaataccgaagccgaggacaaccacatcgaacttcagaactctgaggacgaagaagacggagatggagatcgggagagttcgtcccaggatggccacgatgacgaccacgatgacgacgatgaccacgacgaagttgacaatcccgatacggagccaggcataatcttgcctgacgacatcggaccatccactgagctggcagctacgtggctggacggtctccacaggaagcaagacagtctcagaaaaggtagggcatattagatattattgccttatgtcccactgctaatccccgtaatttagctgttcgtcccaaaaccctgcgtcaccttgggcttaactgcccagggccgggccgggtccttgatggccaagtgctgggcacgcaggtgtgccctaaaagcacggttatctcgctcgagacgggcgtcctctataagacaagaattggcacaaaataccacatcgggctcaaaacccgatgcgcgccttgtaatgggcgcttcatgtttgacgaatttttgaggaagaatcttttagaaaagaatccggaccaaacaatatgctgccacgagagctgcgtcgggtctctgtgggagagctcgaaactctgcatgaaacacttcctggagtggacaccggagctcctcgaagaagacatcgacgcgatgaacgacctccgggagttagcccacagagctacatctgagcggtggcacccgcagactatcctaacggcgagagccataacaatgaggaaatgcggtgaggccaatgtcccggcttcccagatcgtcactatcgatctggagacgaatatgcattcaagagaggtgctgcaggtcggcatcgttgattccaaaggcgcggtagtacttgattgcctcactagatatagtgagggagtcaccgcgccttccgtgtcgtcatcgagtgggccggcaacctggcgccaaaggcaatgggaaagcaaagtacgacattacaccacggtcaatggaacccttgatgcaaagggcgtcgttcggaaactccgagcgaatggaatcgacaaagacaccattttcgtggcctgggcgacgtggcccctcgacctgaactacttgagactgtggctagaggatgagaagtttgaggacattctccccggtgatgagaatgtctgcatgctcatgagtgaattccgcgctaacttcaagagcatgcttggcaccacctgctaccgaggcagggcgtttcccctttccctgcctgtgctgtttgtggtgttcttcggaaatacccacgatctcgcagggcgcaatcaccatgctctgtatgacgcacagcaaacggcgttgctgatgacgctgttcgaggacctctgtcgacacccacacgagcgggtgttttttaaaggatgcggggcgaccaacatgggctcgcggaagagacagatatcgatagaggagtcgttggcttcgatgagtatccccaaaagggtacggcatcactaggatgaggatgaggatgaggaccaataagaataccaaggcggttgtgagattgtctctttttcttttttcgttttctttttttctttttcttttcggcgcatagatctgtctactaaatacgccctttctttttgaaccctggccctggaagctttagaatgagagcttggaagttgcaacgacagtagttactatacgggcaacttcccgtcctcctctagcggttgtccctagacgtctataaatacctatatctacagggacggctttaacgcgatcgataggggtgtatacgcaatacaataggcaacgagcgcaatcttagtttagctactcccctatcccggcggatattatatctagggtctagaaccaaccacttagggcacgctacctagtttgtagcctcgggctaactatcatactgagatcattagaattcatagcctagcatttgataacgaagattaagctctctttttcttgacagatcgccattctataagtaaacttccaatcaacgtcgtatatatcaacctatctcacccaagcttttaccaatatccctaggaacctctatagatcagtttgctagggcctatcctataatatccgtcaacccgttgtcttagattgtcgcaggttcaatgtttgggactacgcggactagattagtcgcgagttgatccataaaaatgacctaagcaacacaatattactacgaggttctctcactgtttctgtgtttcatactcaatatcaagggaaatagtctcgtatccaatgatgcatataaataatctcttggagatttggctattcaactttgacctacccatggtgtgctcctatattgatggaagcccgtagctgctcttaggatacaaatctcagtctgtttatctcaagagctagccatttcgaagagaacacctttggcttcgctcgtaatcagggaatgcccatttaaccatccactccgaagtaagtacctcatcaacggtcggtctctcctcaggccgaaatgacaacattcggcgcatcaaatctagaaacgctgctttctcattctcgtcaaccgcaccccctaatttacgtctccatttttgaacaccaatttcaaagagtcctcaagagaaggccatctgttttcctggtacgactccgttgggcatccttgttcatcaaaaaaccgaggccgtccttcccaacgctgccaccattccgaaggcataggccctagtacatcgatgtgctgagacactatttcatccccatgtacgaaatctgtgctaaagattgctttcattccaatgatctcccagattgtcgtagctagactccagatatctgagggatatgtgagcggagcctgtggttcgaatttggcttctggagctcgaaatgcgggtggtgtatgacagtcttgaccaaggcgaacttccagtgtaggagagaaagcctcaccaaagtcgcttaaaagcggttgtgcgtcagatagtgagaatttctccgcatatttccctagaaatagtggcaccacagccttagccgggatgttaggggatagtgattctccgtcacgccgtgtgactggaactgtctcaggctcgccgtattgttgatataactgcgcgatggaaaggtcgtcaaagctcgatgggagcttgaccaaaacgttatttaaatgtatgtctaaacaatggatgtccgtattatcagctcactgatttcaacattttaacaggagaaaaggtattgctgctattacaaacctccatgaataaagccttgtgaatgggtataagcgacagcttccacaagtttatatgatagtgctcgagcaacttcaatagagaaaagacggctaaaggagatctccctaaggttgcattgcgtaggggtcaccgtgtaacacgtgtgctttccattaggaccttggacttcaaattcatcaagtagcttaggtactagatcacgcccggggtgtataggtgaagacggcggaagtggagcagatagtgccttgaggaccttagtctcgcgcgacggtgagtctgccgtatttatcttgacagcaacatatcgcttgagataagtatcttgggcaagccaaacagtcgagtagccaccgaatccgagtttatctacaatgtgatatcggtcctttagcatatctccgaccatgacgggatgataacccctaggcgcatattcttcgagagcctccacacccttgatccagttgtacttgatgcgatggtcctcagccatcgtggaggtcagccgcgcaaaagagcaagatttgagcttttgaagacgtccaaggggtggtacaattaaatgtgaaggtggatgtggaatcagcgttggacacaatggcaaaaaatccgcgaatattctcaagcagcgtgtcatggtatgtcggagtgaatgtttgaaagggtgcctaggaaaataaaatacggactgaagcttgcctgtctttgcgtctccaaggctgattatccacagattaaacacccaggggtgtccgaccgccttcgccagtcggagatcggtgaaagtctcgagccgagactgtagcctcgctctcctggcagaccaagatatgctctattctacactcaaccaagtcacccctcgtcgcgacaccaaaaagcggcctcgcggtgcttgttgtagtcactcgcaggcgccaggcggtctgtcaaatgcttggcccgtttgatgcaaatctaacccgatacgagaattggcgggttctcattaacaaatatgtacgttaacgtccatgcggctgacaaattaggcaaaagaaaaaatttttataggtcgctaaagccgcggagattctctcgcttcctacaccacctgcagcagctctggcaatcgcagttgataaatacaagaccagtattgcagcagggcacccggcacttctggcacatggcaaagaggaagcgctacaggctgataatacccattgattctaaagccatgtcggggatggggttcttcgggtgtgtacagagcagacaatacccttgagtttgccgaagctgccgaggccattgcgaagcatgccgatctacatggcccacgatttgtcatcgaagaatattgcgatggaccagaagtgaatgccaatcttgtactcagcgagggcgagatactgttttctcaagtatgcgacgaacagcctaaactaggcgatggaacgcttgaagagaaggcactgggttttaccgagtcaggtgttatgtggcattcaaatttgccatcaagcgaacagaacttgatccgttcaagacctgcaccagaagcttttgcggctgggacttcactccggtgtactccatttgaggcccgtttcaaagtctcactaaagctttgttagcgaaagttaaaccgatggtatagtcctgttgctaaagcctccgttgtacttttggtagcttccagatcttgcgtgggcatgggggctgataatgttgatcgattcgactatggtaagcaaaagaactgctaccgaggcaaggcgtttcctctttccctgcctgtgctgtttgtggtattcttcggaaatacccacgacctgcagggcgcaatcaccatgcgctctacgacgcatagcaaagcacgttgctgacgaggctttcgaggacctctacacccacacgagcgggtgtttttgaaaggatgtggggcgaccaacatgggctcgcggaagagagaaatgtcgatagaggagtcgttgaccttgatgagtatccccaaaagagtacggcatcactatggttaagaatggcaatgaacatcaaatattacgttgctgtcatgcagctgtgttgtaggagaacgggaactcggaggataggctgatgtccgttgtcacgtggccaataagatttaggtatattaccatacataaccatgtgttatgtacatgggaggattaactatgtagtaacatacgaatatcattcatctaagacaactacatgtacatttactatggagtatttcctataatccctatgcgtacggagtactccgtagactattgaagtaatagttgcctaggtggagtacgtgacagatgtcaccataactaactatacattagttaactaactaactagttagttagttacatagtagttagcgctgatagaaacccatcgacatcagcccattaaaacggccaacaggtttcaaaccctgtggtttggactctttgtgtctctctcttcttctcaagtttcgagtttcctaatatgtatatgttgtatcttggttggttctttgattctttggctgttaaactctatatgctctttgtatattctatatccctttgaaataagtaaaaccctcaccaaatggcacagtctgcttaaattagaacattttctttcactagaatgactccatttccttcatttccttcatttaccatttttcgttgtcctaacactttttgttacaagcgtggcggatcacccgcggggactgcggggctcttgaatcccatcacactcctcgactttcccctttcccttctcgttatctgtctctgttctctgttctctctttttttctattttattcccttctctctctcttctctaaaggactctcgtttctcctcgactttcgcctttcctacagttccaaaagttccaagtcgaactcgcgaccatggctgatttacaaggtcgcaaggtcttcaaggttttcaaccaggactttatcgtgagcgagcaatacaatgtgaccaaggagctgggccagggagcctacggtatcgtgtggtaggtattccagacatcaagcgtggagggcactggacactgaacactggactctggagatacacgtgctgatagtaccaagtgccgcaaccaacatccagaccggcgagggcgtcgccgtcaagaaggtcaccaatgtcttcagcaagaagatcctggccaagcgggccttgcgagagatcaagctgcttcagcatttccgtggccatcgcaatgtaggctgcagcgcatccttatcaatacctgtacccgctaactcagccttccagatcacatgcctgtacgatatggatattccccgaccggacaactttaacgaaacatatctctatgagggtaggtggcctaccgctttgcgtcgaatagggcaggactgataatcatgcagaattgatggaatgtgatctggctgctatcatccgctccggccagcctttgaccgatgcccacttccaatccttcatctaccagatcctctgtggtctcaagtacatccactcggccaacgtcctgcaccgtgatctcaaacccggtaacctgctcgtcaatgcagactgtgagctcaagatctgtgatttcggcctggctcgtggtttctcaatcgacccggaggagaacgcgggatacatgaccgaatacgtcgcgaccagatggtaccgtgcaccggagatcatgttgagcttccaaagctataccaaagcgagtatgtaacaccgtcataacctgccactgaattccccgttaacctcacatgtgtagttgacgtctggtccgtgggctgtatcctcgccgagctcctcggtggccgacccttcttcaagggccgtgactatgtcgaccagctgaatcagatcctgcactacctgggtacaccaaacgaagagaccctggcgcgcattggatcgccccgcgcccaggaatatgtgcgcaatctgccattcatgccgaaggtggccttcaagcagctgttccctcaagccaaccccgatgcgttggatctgttggaccgtatgctggcgttcgatccatcgtctcgtatctccgtcgaggaggccctcgagcacccctacctgcacatctggcacgacgcttcggacgagccaaactgccccaccaccttcgacttccacttcgaggtcgttgatgaagtgcccgagatgcgcaagatgatcctcgacgaggtcatccgcttccgggctaccgtccgccagcaatcgcaggcccacgccgcccagcagcagcagatcgctcagcagactaacatccccatcccggataaccaccagggtccttggaagaccgaggatcctagacctcaggaggctaccgctggcggtggttacaaccctaatgacttggaatcctcgctgcagcgcggcatggacgtgcatcaccgttgatacctcttttcttctttctgcctttttctcgtcttgttggttcggcgtgttgaatccgatcgtgctttctatcgcgccttgcatgttgatctaatttagccaagagataccttcagagaaacaaaaaaagactgggatgatttacatggggtcttctttcacctttcaatttccattataactgcaatctcgaactcgactttctcctttccgtttgtggttctgcgagctgcgttctcacccctgcgtgcgtttcctacttcctttggtgtgacattcgcgtccagtctgaatcctttgactacttccaaggtaaggcgctatgattgtggttcctggttgggtatgatacttgggtctctatgacattatgtgaattgcatctcattcaagtaggtccattattagatagattgtcaatcaaaaacttccccttcatcaggtgtttgtcaatgtgtatccaactaaaacgaggtagctcaaatacgttagcttttatacctactactctcgatttctatgaggaaatggccgtatagcactgagatgtgctagctacgtaataacctgattttggtcaagaacttcctaactaatttaccgactctcagccagttccagttcttatggatgaggagcttgaagagcctccacagctacgcattctagcgacaggcggcacgcactcggattgaggagtttgtggctagatgccgaacctgaagcggcagtagcaaccatgctaaatgctgacgatctactctcgcgtttaggaggacggtggcacggtatctacgtacgatagtcccgtcgtagtgataaagaagatcaagaatgtgggaaagcctacctgaatccgctagtctatcactaaggtccttgatttcatagcgactatgagtgcatgaatcgatttatgttatcttccgttagtacatattaaactttatataaccttgtaggttgacatgaagtgagggccaatatgcctctaactatagatatcaaaggtgacctagggctacctatatcgtttgagctcaaaaccaccttagcttagcctcactttctatgcttgtcttcttagtgataagatgtacggagtgaacgagatcataaaaggctgtacaagatagtattgtactgtgcgacagagctatgtaagagaggaagaaagggtagtgtgaactgaggtatatcagtaacaaggtatagttgtggacaagtggtatttgatacagttatacgtgagaattgattcaattcaaaggacgaagtgagagatgacgatacctacatatatagttgtcctaagtgttgaatctccctgtcctgatcaagtttccaattgtgcttcgaatcggtgaatcattggctaggaaccatcagtctttctctttgcttttgaaggcgacagtcgcaaatctctgccatcataatgaattacccccggcaattaagattgcccgataaaatggatgcctatgccagtcacctagacaccatgaacaggcacgcacaatagacgttgggatgcgcctgtccgatgctcttgtgctcctcgtcatcgccacaggtgtcccagccggaagaacaggatgatcagccttgctactccgtcatggaggacgtcactccctccgccacttgtttgcactgctacgtctatttttcactgcgaacgcatattacaaaaccaagagcgatccaaacctgacccagccagattcagatgagtctaaagcgcttgagaaacgtgaagaggaggcttatgaggccgcaaaagtcattcgcaaagagatgtccttccagtctaacaacaagctccacgcctcaaagcacacgacagcagcagttgatgacactacagtggcgtacagccagcccagtgggtgcggaggcggatgccttaccacgcgatttgcccattatgaagtcagacaggcccctatcgccaagccggatatggcatacgaaacttggcgctgtgcatcaaccgtcgtcggtttgacgacccagcagaagttgcttgtcgcgtgccttgacaccagctgcgtcatggctatcattgacgcagaccttcccaccgtcacgcccgttagctgatttcaattcagacggagacatcaagccagaaatggcgaatgggagatccagtggccatatgccttcggagttttgccaggctagtactgcctgtgtctcctctctctgcttctttctctgcttctttctcactctcctccctcagtctttgttagctcgacaatacagatcgccgttcgccgacaaaagtccttactttcttccctggtcagagcttcagaggtaccctcgagaactaaactggcaacctcttcgcctacaattcgataacgcaatatgacatccaaaaatttgttatgcttgcccactgagatcctggatatcattacactacatacagtacgcttatgaggtctattccctctcgcaaacatgtcaccgactccatagcatcgccgatagatgtctctacaagtattatgcgaaagaatgtgctccgcatgtacttgagcgcatcgtgatggacgacaacagtgacgccctctacaagctcttggtccatgaactcaatttccatcaatactttcctcaacccccatcatgctgaccgtcgataaggatcttgcaagaattgccgagctgcttgttgcctacagcgggatgcgtttgcaaagcgatcgatacaaatatgccacatcactcttcgttccggcctacagggaatatgagcgtgacctcgaaaaaggcgctcttccacgtcgcgtacaaaggcagcctcggtgtcctgaaagtacttgtattctctccggtagggcccagattgcacatggccgttgttctgcggtacgcggtcaaacaaagccatttagccttggctaaatacttgatcgaggagggggaggtcaatgtcatggcgcacttccctcctgcgatagttgggactggatgttgttcgaaggacagactcgaaaagtgcgtggcggaggtgtgttgcagagaagagaagtttgtatcgtcggtcttgaaccataggaaggggcgatcactcacatagagccccgacgccaatttgggcttctggactatagcggtgccacatgaagatattagctatgatccagctacgttgagttagatgttctgagcatggatacataatataaacgtcttgttacggctcaaatatatacaacagattgcaccctctatcaccactaaggatgtaacttgcagccgacgcaaggagcgggcggctcctcactatggtatatatcaggtctcggttcccctgtcacattcaaatatcccacgccacctttttcaaggcgaaatatggcatggtctacgagtgtatatgtgccaggaaccagcatcttcatatcaacgactgttgaaccgcctggaggaacactaaccgtctgcacaaactgtccaggagggctaacaacatccccatcacggtagaccttctcaaaggcactcccaataacgtgaaaagagcttgtaaggtttggccctgcgtttccgaagaatattcgaactttctcgcccacagaagctttaaggggcttatctctcgttagcgcagcctcgtgtccattgaagacaacaacacttggctcctcccggagcgcattgggatacgagaactccactattgatgatggtttcccgttatcctcgatttccggaggttcatgatagaactcgctctgcatcacatagtactcgcgatccgctggagggaggtctcctgtggctggctccacatacatgagaccatacatcccgttggcaatatgtactggcacaggtgctgctgcacaatggtacaaataaagacctgggtaatggagccgaaatctcgcggtcttggtctggccttcttctgctgtcgtcagcgcagaaccccctcccggccctataaacgcgtggcagtcgatattatgcggattgccggctttgtcgcggttcgtcaacgataactccacaacatccccaacccgagctcgaatgaatgggccagggacaatgccattaaaattccactgttcgtacttgtgttggctggtaagttgttttgtcttagtgctagttgtcaacggcacttggaggagaacggggtgatttcgagttatcggtggaggtacacttggtgcctccgtgaggacagcctcctctattgggagcttagagctgtcaattaatccttgccccggggcaacgtaaggctgcgagtgtgactgcgctgtttcattcccccgaggcactagggttgtgtctagcccgcttgcttcttcgcccgtggttgtgtccatccggagggaaccctggtgtcgaaagtatattatcacactgaatgcaattgatgcagatagagcaagagagtatctccacgggattctatctgcacggagctctgcgtgagtttttggttcggtcgaaataagcctagcctgtgtgaccccggcttgccagaatagtgacgaccgggctgcacgcaaaggcggggggaaagctcttctcatttttggagcgagacattgtctgccccctgccactagaattgaggggctcgatatcgtacgtgaataattcattcctctttgcatgattcacttgccgaagagcgatgacttcttacttcagttaggtatgagaacaaaagatggtttctcgaaaaatggatattcattagttccttaggttctatctatacgtgtgcgagaacgccctgtctagactaaccttggaatgtcatccgtcattattacaaagacgtgaaataccaaaagaatctatgatgattcattcatttatatataattctccgcggagatggagaagctctatgttggaatcttgttaagatcacgagctacctagataagatgaatgacgtctgtttgacccatgtggaaatagctcgattattgatctctggtacagccaaaaacggctcttttgccaataggcgttccaaggttctgctatgcagaaatacagaacatacaacctgggcagataactacatatgtagtccttataagtggagtggcttaacaataggaccattacgacatacctattgttaatcgtctgtgatcttgacaaactgtttataatggatgggatcatgacgtttattgtgtcttcattgcgagatctaaagatttgaaggacatggatggaggcggtagggaatagtaggaaagagtatatgacaacaacaacagaaacgtaaattcaacgtaatttccacaagggcccacgacctaaatggaagcggagccttgaagaaacaaagtgtcctcagaaaaatcttcggacaacagagagctatctctgtaagacaagttccaaaaattggctcaaagagcacggtgttcagctccctcagggtcaatggagaccccaggaaagtacagtctgtatccacagaggtctcagggaggaatatggtcctaccaggcagcgacatgcttcgtgccattagacaggaccggagtcccatctagtttcagactaacctggaccgcagcagagatccaacaggagactgaacgtccaggaccacgatgtgcaatatggacctggggagttgaagagggaagaaaaaaaaagggagggaagtgggaagggagagggtatttataccctggcagtgactgatgcgaggaaggaacgaggaggtcaatgaccagttgtgttccgttgactaaaagggaaggtgcctgtccaggtcatcggggaggtatatagtcatatgtacatacatatatgtatgcatgtgcatttctgaggccattgtgtagcttggagaagtagcatatataatagagccataatcagatcagacaaaatgagattcatgcattcatgtacgatatcatcgtaaactaaccgactatagccagtagacctaataaaccaagtcaggaattcttaataccaagaccaagaccaagaccaatatatatctcaataataataccccctccaccaaacagccatacaagccgcaacaaccagatcaagcattttaatcccttcatcttcaataaccaacttccccagtttcgcactcttcccccgtagcccaccgccggcattctccctcgccagcgacaagtccaagcgatcctcatcggaatcataatccaaatccccaccactactattactcgtactgcggtgcgagtggggctgagaacctgggtggagctggctctggcgtgcgaagcgttgcgcacgcatagaggttctgcggaggagggttgaggggttgaagtttgcacgcgagtcggcggggggtgaggcggggtgaggtggggttgagcctggtcccgtgtgtgcgcggggccgggcgtaggcgtttgggtttaggaattgggagagagagttgcgctttgccgctgcgaagctgttgttcgaggaggatgggtggaggggtcctccctcaggactggggttgttgtcatttgggttgtcatttgggcgggagagggacggggtttggatttggctttgggtgaagggagagaggtggtttgggtggggtttgtggattgcatggtgggcatgggagtgaagatttgctgcttggaagggggtgttgaagcggagctcggcgacggttacggcggggggtgcttctgcttcgccattgggaggaatgaagccgccgggtgtcgggatcatgtgtttgcatttgaggcttcggccgttcacgctgtttgtgaatgtacatgtgccattccagggagaagtgaagacgtagtagccgctctttagcttagatgaggatgggccatctgggttgtggccgttgctgctatccgtggcgacggagtcgtcaaatggttttgacacgcagagctggcggtggaatttgcgtgggccagtcggctgctcctttggttgctcagcagctaaggattggacaatggcagagttgggtaggcgcccgattcccgtcgggagattggccgccaggctggataatgaaggcatctcgttagagcccgcgaatctgttatatcccggcgttgaaatctcgatatcgacggcattgcggtccattcgtggggttgatatagttgccacattccattgtgtaccggacgtaggatcacgtcggatgagcgtgatatgaaagccagcattgctacgagggtcgtcatgttcgtttctatgccggttaggagattgcccggggcttcctaatggtgatccggtacggttatgcgaagaacgaggtcgcaattgcggtccattagagtcaaggctatggcggccagccgcaaacgcctcgtactttgcctcatactttcccctccagttctctccccgattttgcaattgctcggtgaatgcgctccatcgggatgtcctcttagacgggtcctcgcctgctgcagaattggtccatgactcttcaccaggcggcaagggaggtaaaggtcgccgcgagacaccgctcttaccacccgattctactgatacccctccagacgtattattagtcaaagggggctgcatgttggcgactggagtgccggagaaagatacattctccgcagtaacctgcggcatagggactggccgtggtggtagggccggaggagcagtggcatcctgcgcggcgtcatcctgcggcatagggattggacgcggcggtaaggccggagaagcaatttcatcctgcagcgcaggggttggacgtaatggcaaggcgggaggagcagtggcatcctgtttaggcggtgccagcgaaggctcggtgttgaggtcccctccgccaccaactggtttccggcgcacattattcagccgcgcgaactcgcgttgtgccgggtcgtcgactcccgctttcgcgagacgctccttgcgcaactgggcctcctcttcgcgctcttcttccacttcctggagcagggtatcatcgtcgggagtcgcgacgtggagataatatagagaggcattgatcgcctcggcagagacactggatttggtcgggggtttgagaggtgagaggaagatgtctgcgcatagaaatagcagtcagtatggttatattcatttggttgttaaagcagcaacaaggcgcaactatgggactttcaagaccaaaagacaaaaaccagagtgtcaaaactgtgaattgattcatacctttgcttcctggcacacgcacaatgtacaaagacagcggttcgtgcttctcgtgagttggattgcgagggtaggcggggggatttgatgcgatagtggtgaccgaagacagtgagcgtgcctcgacggggccctgagggatagtagacattgcggacaaggccgcgatccgccccgacaagaaacgcaggtagaatatcgaaagacaaaggttacctaggtatgtagagttgaggttggcaaataaacaatggggctctcggcagtgggcggagttggtccgccggggaacgagggcttggtgtatttcttttttctcttctgttcttctttctgtcttctgtcagtggggtgaagttgcacaggcgagaaacaaagggatgcaagggcgcaagaatatagaatgctgcctatcgtggcgcagtacgcgtgggcacccttaggcctcgattacgttgggatctactataactacctacaatactgttggtaaacctgaggtcaccaatgcaattggcgaaaattaccgccgttggggccaaaatgaccgccaaacgccaaaagatgccttatcactaaggggaattcaccaacgaccagcgcacttcccaccaacttccacctcatccaatgacaactatattcgatatcccgggcagcaacagcccaaatgccttctcgacgccaatccaagcccttctaacccttagcaaacattcatcaacgccagcgccagatgagacagccaccaacatcgtcaactccgtggcttcgtcttcagaccctgcgcacgcgctctgggagctctgggacgcctttttcaccgctgtcgccacctcttcaacatcgcatgagcctctcctcgcccttctcgatgcccttcatgcgcagccgccaacgcagctcagcatacgcgcacgagccaaggcagagcgacagcggaacagctacatcggggccgacggaaatctacactggcagacactgccacagttcagcgcgcagtggcgcgacgtgcatgatgtactcgaggcctggcgcgactgggatggggtgcgtgactcgggcgcggggggcagctggactgtcagtacagtaggtagcagcggcggagagtacttcctccgcttttgcgtcttctcggctgcgctgctgaaatcgaccaaaggtaaagacaaggcgtatcctatatgggtcttctatgcgtgccgcgacgtgctggagcgtgagagacctcagttctgtccaccaaaagcccataggatgtcgtcggagcaggtgtgggcgctggatgtccgagtagcagcgatctggatgcgggatgggggcccggcactgtgggaggcggactatgaggggctgcggcagcactgggcggcggccttggatgagaagacggagttgtggccgagggaggaggggctgacgcgggagcggtggctattttgggggaataggctacgagctttaagtacagagggaacattggacaaggaaaccgtggcagtggttatagaagctgctgaagtcgttagccttttagttggaggctcgaacttagggtattgacgctacgtacctaagtgtgactgctattgttgttcatggttcatatatttggtatcttcagaatggctatacggccagaaataaaatagaatggtctgaaaagaaaaaaggaacacaattgaaggaatgcaatccggaggcagtactccttgggggtgtcgatacaaaaagaaactccatgctgtaacgccagacatttccatgtccatgtccacgtcctaaaaagaaacgaagtgaaaatcccaatgttaactgatattagaccacagtttcggaccgttcgccttctgcaatgactggtacacccagaccacgatccggactctgcaaaacaagctgttcatgacgtcgtgcccgcaggaagtcactgaccgcacgtatcaagatgaaccaaccaacaatcatgagaatatatgatatccattcactcgtggtgatgccagacatggtaccattccctccattgcccccgccctcaccaactgagttagggtcgaagttgtggctgttggggtcaggtggaggaacgtattctgagcctccaccgtcggagccggaactttcgttgccacctttcatatagaagccgtattgaacaagagtaagaccgagacctgctcggctgccgttctttgcggcatgggtggtgtggaggagatacgtcagcaagaagccaacaagctggaatgacattgagatcatggcgttccagacaaatgagaaaacagatccaacaggcagtccgtcgacatagacctcgtcggaagagataccaggtgccacaatggtggtctcccagtatggcggtgtcgcatcagcggcggcttcttcgtatgactaaataagatatcagtacacaagtctttcgtacatatcaaagagaaccaatcatcaacttacaggaggaagatcatcattcttctcaccccgttctggcttggcggcaagattggcaaagactccatcattcgatgaggcgatctgccgactccctccagaagctggtgctgtgaaagtcggcaacatggtcggccgtctaaaagtccctgattgagtccgctctggtgaatcgcccctcgactccgacgacgacgccgtggcggaagggccgttatccgggggagcccggaagtcggggtcggctcgcatcaagcgctgcctgtcatccggctcattatcatcgtcggactcgtcttcgtcgccgaaggcatcggccagtgtctgttcatcatcgttgtgttgtggatcggtgtgtaatagccgcctcgacgatggcgacgatgagcgggatccggaacggtaagaggaaggtgaggaggtgttgtgttcgggtcgcgcgttcagcggataggagtgtagtccttcttcttcatcttgggcattcacctagacatgtagtggtcagtatcctgccgagggattccatccgggggacttgttctgataggggatcagcgggggttacgtacccgtgaatagcgctgcgagctcatggcgagctgagcgggaagcgaccctgaatggaatcagaaagtaaaatgggacagaaaggacttcggttagaatgcgaaaatgattatcacacaagtacaaggggatgggaaaatgacggggccgatgagaaggcaacaggaatggatgtggctgatgatgcctgatgcgccaggccaaaatagactgttcccgtctttgcctcaacttgcagaggaagatccttcccctataccacaattatcttgtgatatatccggtccaccatgtctaaagcacccgtgagtatataaatatgagaaccatcccaaacagcaccatcgacgagccccctcatggttcaattccaaggcacatctcctaacaaaccgtccagacccttaacccgcgctccctccaaagtcgcctcaaccacattctcaagcactggccctcggatgcagtccgcccagcctcagtctccgtccaaaactacatccagtcccgtctccagccagcagacaagtccagcccagcgatctccgagtcctccacgaatgcacttgaatcgctgctgaacaaccgctacgcgcgcaagtatcccatgccggagaagctccgccggccggccagtaacccagaccactacgacaatgtcgtacgtgagtttgcagaggcaccgaaccgcgattggcttggccggttacggaagaggttggctggtattatccgcttgacgtgatgtttctattcttgctgtatgtatagacttttggttctttgacactggaaaccttggggatacttgatttatcattgcctggctggattgggtcagcattattggggttttataatgatgggttgcatgacatgtaccaataccttttctctttttttcgttttattgtatacctactatgtttcctatccgggtgtacgatttattcagagcaatgttcttcttgatgcatatccaggatatattcatgggaatgaactttgaaacaatcgaactcctaattgctatatacaaacgcttgacaaatcatacagtctgcatgcaaatttacagcatgggcttcaggtcatcggcgaccttgaagggggcctcggtcttagcctggacctcctcgacggtgacaccgtcagcgatctcaataagagtcaggccgtgggtgaagtcaacgtcgaagacgcagaggtcggtgatgatacggctgacgcaagcagggccggtcagagggaattcgcagttcttgacaatcttggggttacccttcttgtcggtgtgttccatggtcacgacgaccttggtggcagaggggttggagaccaagtccatggcaccgccgaagcccttgatcttaccgggaagcatccctgcgcgagaatgttagttatgtgcatgaaacagaggaaaagtgagaaaacgtacagttggccaagtcacccttggcgctgacctgcatggcacccaggatggtcaggtcgatacggccggagcggatcatgccgaaggactcgtcgctgccgaagcagctagcaccgggcttgagagtgacagtctccttgccggcgttgatgagatcagggtcctcctggccctgcttggggtaagggccgagaccgaggataccgttctcagattgcagggtcacctcaacggaggggtcgacaaagctgggagcaagcatgggcataccaataccaaggttggcgtacatgccgttcttgaactccttagcagcacggcggacgatacgctcgcgcttgttggcggtctcacccttgccgagagcagaggtgtctgcaccctcctccttggcgaaggtgaacttctcgatattcttgggggtggtgctctggataacacgcttgacgtagataccgggcaggtggatggcagccggttcgatctcgccgggctcgacgatgtgctcagcctcgacgatggtcatcttggcgttacggcccatggcaccgttgaagttggcggccgcgtagcggaactggcagttaccaagcttgtcggccttccacgccttgacgaaagcgtagtcacccttgatcgcctcctccatgacgtagctcttgccgtcgaacaccttggtgtcgcgcgcctcgctgtactttgcgactgtgccatcagcattgtgtcgtaggggcaccgcaccggtctgcaccacggtaccgaaggcggcgggtgtgtagaatgcggggatacccgcaccgccagaacggcatcgttcagcaagagttccctggggactgagctccaactcgatctcaccagtgaggtacatgcgctcgaaggttttgttctcgccgacgtaagaagcaatcatctttttgatctgcttagacttgaggagcagaccgagaccagctccgtccacaccagcgttgttactggccacggtcaggccagtgatagaggggttcgccagtacggcgttgatcagcgagtcaggtacaccagacaacccgaatccaccggcgagcagagtcgagttggacttcatgtccttgactgctacctcggcggaggggtacaccttgttgatctcacttcggcggacgctgctggagaatgcgcgggccatgaaacgttggtgctagtttaaaaaagacatgtcagtctccgcggctcgaaaagcgacatgggccatgagctattggcaaatcacttacctggacaggattggcggagaactgacgcgcgaggcgcaggcatgttgccacttgcgaaggcatagcgaaggacttccaaatagaagattagatgttatattaataaatccccaagtccgcagcaaggtataaaaggctcaaaataaatgcccatggcagcggcaatcgccacttcttatattcccgcacggcagtgaaggcggaatcattcccgagtgatattcgtttccccggaaatgtggattcccggctctctcccgcctctatgaactgccctgactacaatacttttaacccccgaagcccctgaacatggtgactaactattaaggatatcccaaagtcaagtacaagcaaattctacgtatttctcatcctttttttgcttctcattgccttcagaatccccctagactgattgacatctcttcttgccgctgccgaaatccacagccgatccgtatccgattcccgcggcttgcccaggtgggaaatcggctgtgctgagtcagcttcctatggtcacctgatacgtttatccggggtaacgaagtaccaaccgtagtagtagcaacgtagcaaagtagcaaagtacatacatacatgaagcagcctggagcttgaaacgatcaaatataaagagaaagatcaatttcgactatcttagctctacaagtactccatggtatcttcagcgtatgtacatgctggataacaaaaaacatttcacacctcgcaatgcagtaatatccacgtgcagacataaaagaatcgagaaatcatgcaaatcatgttatcatgctgtccaggcgggtgtcacgcagtgtaagaaattaaatcggacgggtttgtttcacttcatcgacactcttgcgttttagagggttgacagcttccgcatcgacgggcgtaacattggaatctaccaatactgctccgagtcagtcgcaggacgaggacggggccatgccgtgttctccatgtcggattttgtgttttccgtacctggagttccattgatggccgacgcttcctcgtaggatggaggttccatattcacgtccggcgcagggctggtgggttgaacaccctccatggtggtggcttgttccagatcgggaagttcggacatgttgtcggatatcacacggcagacggggtttgccagacggtctttcatgctatcgttgacataaacaaggaagtatggggtcggagggttgttggtcgagtcgtttttgaagatctcatccacattctggacctcggtgacgtactcgtcgttgtatttgcgccatatattcttgtcaaagtcgaagatgtagatgtagtaatggccaaatgagactgacccatggtgcacaaaaacagcgtacagtcggtatgggagttgatggaaatcggcaaattggctggaaatcatggtctgcgtatccttgatctctcggtcgacagctatgaaaagagtcaacacgcctgttccatgtaaaaaaccgtggtattagaactcttaccttgcaggtcggtctctgctttattggcaaggcactcgagtttgtccagtaactctgtactagccacggcgtccatcgaatcagattccagttcggttccggttccggtctcggtgtcgttttcaatagagtctagatcttgtagcgcggtcttgactctacggaacaatgttgccacgtcgacgcccgcaccctcctgtagaaaagaaaagattagctatatagacctggggaacatcgactgagagtattcgatacctttgttctgagaagctcttcccgacgagcctcgagcctcttcagagatgccttccactcccagcattggtttcgtcgatccacaatatcgggattcttggtgtccatgtatcgatccatgtagatagtttcaagcaacccgagatggtttgtagatttgaacgagcatttcttcacaggatcaaactggacccgttgcacctggatctggagaacagggggaagctggctaatggaagcgaattgctcagccacagagttgtccacactaatcttttgaatatcaaatgccccatcaatggcatcgtagatgtttcgagatccgtgagcaacatcaaccttgatatcacaccaccgttcgttcttcgaacgtgtgcctttctcggtggagatgtaagagcgggtctggccgtagaacaggctgataggagggttaacataggtacttagtagacgattgttcataacttactccttgacctggtcaagctgctcaccgtcatcgccaatttctcgaggctggatggcgcactggctctggaacagaacattgttgatgacttctgtcacatcctgctgggcaccaatttctacttcctccttcaattgcttttcccgatcaacttgcgggacgttccgaggagggagggccgggggtacgttggccgatgcagtgtcgtctgtgtcgatattcatgtcctggggagatcctgcctctgcttgatccgacagctggtccaagtccggggggttgttctctttgtcctcaacaaatagtccaggtgcatcgttcatgctattatcagaaaccaacgttgcatcgctgccgtcatcgctcacggttgagttttgaataggtgcgggatcaacttgactagatgatgagactggctccatttgacccccgaggagggtctgtggaggcccaaggggtcccagaataggagcaccgttgatgtcaccgaggatctcgggtctagtggcagtgatcgtcgatcgacgacgtatcgccgcctcattgcttgggctaatcagggtcaaccgagcaagttcctggccgggagtaaccgagatttctgatgagctgatcatgctacggaacaaagtccggagctcgctaaggactgcaaaaggaaagggtcagcttgatagacatagccattggcaccgacaaaagcaacttacaccgctgagatcgctcaacctccttcttcgtcacctttcgcgagcccacttgtttctttgcgaggctttcctcgtcgttgagatccatttggaagcgttcataatccaagaccaattcacggaaaggacggacggagaaataaaactgcaacaggctgttgagatagcatgtgttgccgatgttttgtagtccgactggccaatcttgcatgcttctatccggctcgttggagatacctgccatattcctcaatgttgagctgtccagttgtttggcaatgattgtcagtgcctgattgtatttttcggcatcccctgggttttcatcgacgcagattgtatatgcggctatgattgctccatcatcgacagttcgatcgggaatttggagtagacggtacgcatcgccaatgtccatttcaccagctatcatttctccagtattgatgaaatgattcaatgcgaccgattttcgggactcggcgatgagtgccacggcgcgcttcgccagttctttggtaagtggattgtcattgacctaattgatgccaatgttaacttgcgttcaacccacaaataaagcgctcatagaacacacctttgcggtgtacatagtcatgacaaaatcatcgggggtctgattctcgacccccaagaacacattcgcttgttcaacagtagaaacacctattgttaaaaattagcacccattcgactttggtgacaaaatgactggatcaacacacgatcttctgatgccgctttgatgcgcgaacttcccctggagtcgccaatccgccacaactgctgacgcgcttcagtatcttgtgtcgtcgagctgacgaaggcatagaatttgccaatgatgctgtcttcggtgagatttggatcatcgaagtggagattaaagtactgatacgcgttgacaacgtcatcaacggcgtactttccttgttcgtaagctgcctggacagctacgtcaatgaattctttgtcctgaccaccacgaagaaagccgatagccttgagggcagacaagtacatcggggtcctgccaggatcggttaagacctgtcgatcgtatgcttcgaccacagctgacgaggacatatcctccatgactcccaagtcttcataaaaactaaggaaacatgggtcagatccagttctaccaattcaaagatagggtgtacaaacggagcatgaggcatctcgaattccttgtaacgcatagcttccggatctggaacagaaattagtttaaattagttagggctaaaggtcacggtgtacgaacagtcttgcgcttctagagcgcaggaaatagtggggatggcggatgaaggaagattgggaatctggaatccttttctttccgagactgatcttagatgtatcagaactagcaactcatgcagcaagtcgtcgagaaagagacgcatcgtgtcttggtaaggcttttcggcgttagtggtcggtttaggcgggtgccacccggtatcctggatcgattcgtcagcgacatgaaaccaaatgagatcagtgggcaattagaagacatgtaattattacgaaccttattgtacatgaattctagaaattcaagcaattctttagaagcagcaccttccacgccgaaggaatgcatgaacctcttattgacggaggagatgggcttgctgcgttgtggatttcgtagggcattggtaatgtacaggcgcaggttatccaagacattgatcggctgcggatcacccatgccttccatggactcaggatacgttgcagtagcctcctcagctcgtttccgcaacaagtctttatcggtcaacaagcggatggactccggactcagaattggtgaaaggatccgcaaagataccatagccgagcatgaaatgtaggaacattggtagtggtacgtctccgcaacctgccctttaggagttacttcgggcaacgcaagaccattcttctgccgtcctgattggtagaccaaatgatgcaagtgtttcccctgtttctgactgaatgtgcttatgtggctggtgtagttgaccaccacttggagatgataacggcactttgcgcatatggctgagactttggatgatgtgcctggccttctccggtgctctggctcagacatgaaggtttggtcttctttcaaaacatagttgtgtcgacatgcctccggtgatatgaatccgggtgggccgttgtagccttctgggtaaatgggcggagttactgagaggagattacggcctgtgtctggttcgtgcgctgcatcatacagctggacatcatgaatgagacgcggcgcggtctttcctatatgattgatgaaaaacagtcgtaagcgtttgctcaaattatattccagatttgctgatccaggttgctgccttaccggccttctgtacagacgccatgaagtacggtgttcaggcctgaaggcctcacacagttgtgatcttcgtcttgaagctatggcagagttgatcctcccaaagggttgattcttatcaaagctcacaaaagcgtgcaatgtaacagctcagctgtgatggcgatgttgacaaatgatgaaatcgccactgtatgcggagagacagcggggagcccactgcacttggcagcaagcaatggcaagctctataactctctcctccgtgaaatggacagctttgagatcaaattccactcttagaaaacaacaagcagcatctaagaggatcctcgatgataacaaattgttgtaaacgttcgaccgtgaaaagaagtatcaacataatcatgtagagctccgttggaatggtgggcggtggcggtcagggatggcagaaagctgacttccaaaatcctatcgccaaccacatctcataccgcaagcagtccatccctgctatcacacacacatcatggcgcaccacggcgaagaccacagctaccaccccaaggacgccatttcggcagccatgaaggccaccgcgctgaccggaagcgtcggtctcttcgccgccgctgtgcagaacacgctcaccaaacagaacgtcggaactctgggcgtcttcgtccgtggcggtggtaccattactacctttggtatgggcttctctacatatgaattgatagatcaattgctaaattagacatgtttaagcggccatgggtggtacttatgagttcatcaagaccgcttccgccaacctgcgtgagaaggaggaccactacaacgtcgctctgggtggcttcttctcaggtgccattctcggtctccgaggtaagttctgaattcaattgagtctatggttatgtatttaaagctaataatcgggtttgcctcagtccgcacactccccgctgtgctcggatatggtatcgccctgtcgtctgccatgaccgccttcgagtacaccggtggcaccctgtttggataccagaaggacacatcggtggacgagttcgaccgccggacggcgttgcgcaaggcattccagactcccggagagcagactatctcggaagtgggcgaaggacgtggtatgtgcttcctatccggatgagcgctattatctgcgagtactaattttactaggtatctacggccctggttacgaagagagacgccgggagcgtctcaaggcgaactacggcattgaggttcccacatccccagttcctgcatcataagcctatattattctcagtccgccttttcccgttgctttgtgtaaattatccccccatatcacgctgcctatcgcatggacacgcccatccgatttggttttcttcagtccccaggaaattcaaaacaatacacatttcaagtttggaccagcaattgtgccatctcaggtataccgggctgtgaacctactagtacaggccacgcaatcaaatctgaatataagattctgtagaagcatttgcatggaactcaacaaagattgatcttaatgcaggcaggtaccaaggcatgtaccactggtgttcaacaagactccgaatgaggggatatccccggacaagccaggagccaataacagcacgggtatatcaaacaagcggaacattgcgaaatacatacctacgtacttaccaagctagaagaaacatgtcatgcgcccatacactgtaagagcctaacgcaatactcattttatttcgaccgtgctcggaaatccccattctttccatctgaaagccttcaatgttgagaaaccaggatacaagcacattacaattggtagagtcgtccatgacgatcaaatacagggacataatgatgaattggtttcaaagttcctacatgttcagatcgggtcctaaaacccactcgtttctgaaagcccgaccgcggttctgctggggatcgagattgcttgcagctgtttttcccgccttgtccatccccgtcgaatcctccagggctgcttaagcctcttgctttcatgttcctcgtcaatatccacgagtcgctcttcgccttcatggttttgtgtggaatcaatgcgcacattgcggcgtgcaacttcgtggggagaaattttgtaaaggtagtgtcaaactaggatatggtttccattaggccatatacagtaaccttggtttttgtgttggtctagtggaataatgccgtattttattctaataggtagacccattccattccggcttttcgtcgtgccaacccactttacaccaagccgagaacttgtccagggcctttttgtcaacatcgtcggcgttaatgtgttgtatacccaggatgttgcctgttgtttgctgtcggctggaagtatggatcacgaagcgtttgcagttggttgactgttgcttcgtcaagtaaggtgatcatcgggcttctgagaatcgttagatttcccacgagactcagtcgatgccaccgatatagcaagtcggcttagaggtgacggtgccattgcctcaaactcgggacatagttcagcccacatttttgtcagttgtgtttcatcgagtgggacgagttttgggtcgaaagagaaagggagttggaatggtttagtgaacaggtcggtccttcctcgaagcaacctttatgttgtcgaggaagttgcaaccgagggacgtactcagcgcttattcattacatgtcaggtgctttagttggaaggttagaaggtgataacacaaggaaacacaagaaaggtctctaaaaaagacaactgaaaataaaattagagtgatatctcacgtataacgtccctggtatgccgaggtcaattctgagctagctaaaccagtttcctaaagtcatacgtcaaagacagagtaggtacatgtagggacctgatatcacctgacccgtggacatccatggatggatccatccatggatgtgcttcttgatgacttacatgtacatatcacatgatgacgagcaaccattcccctgtacctcgggattggatttacaacagttcagatagaagagtccaaaggaaatagttatggtccgcataaacggaaccacaggtagtattccgaatgagccgggaaattgaatattggatatacctacctaggtatgtgtattataggtagaaggggaaacgttccaagtttgatctgcccccagatcccgacgtcatgcactgttcatcactagatgatcaggggggaagtgtacctatcagccccttttattcttcccatcgatgagccacagatcgagtggatcatgttcatcaataataatcttattccaatagtttctgtctttctctcttcctctcttcccttttagggggcggagtccctcagccactacaggcaaccatatagatgatgtatagaagtccctgttaccatttgcagtaactcgaatgaaatacttttagacggcgttaaattccgatccaatacgtcaaccatgaagatatagagaaatagaagtcaaatggcttttcccccctctcttttgtcccggacatcccgagagcccagtttcttccaaggtttgctcgtcaccatctcacatctcgtagacgtcatcgtcagaaattcctcacgctttaattccccagctttgccagctctgccctatatcggcagcccaatctctcctgatcttctcctttttattattttcaaaactgagtggggcaaaattttatgcttcagtacctcccccgcatacaattgctccgttcgctaggtaaccaaaaagacgccactcttaggcctgtgaactctttggagctattatcctcgattttcgtattttcttttcctttaaaaatttcttactctcaaccttcgattaaatttcgatcttctgcttcgatacttatcttccgaaacctgcataaaccataaaatcccacgttcccgcagatatggcgatggccgcgcggccacagacgccctcacaggatgcatacatggtcccgcaccccaacgatccgggggctttgagtcgcgggtacggcccgcgctctaccctgtcacgaccgaattccttcgccggcacatcagcatactacagctccggcgccctcgagtcgtcgcaggttccccacaacccccggttcaaagaggacttcgataccgccagtcaccgcagctcagtgtttgacggcccggctggagtgcagcggtctgcctccaccatgtcgcacgtgcgatccccaaccccatcccgttcgggtaccttgcggaagaaggcctcgctgagcaagaaggggagcttgcgacgcaatgggagccggagaagcatgcgcgcaggaagtgtgaggagtctgagcttgggtgatcgcgaaaagtaccacaccgagggttcggacgatctcagcagtgctttcgtgactccggttcctactaacggcaacccgaccgaggtactggcgaatcggtttggaggtgagctttactcccgtcaatgcgcgggattgtggatattttactgacgcggactggtagcttggcgcaagctcctgaaggacttgattctattctttaaggaggtccagaaatcatacgaaactagagcgaagctgttcctttccgcctcgagtgtcgttaataaccagactcttccaccgggtttgcttcagtcgggtggtctggccgatgcgacggagatcctccaaaatttccaccgacagggttacaccgaggccaataaagctgttgaagtggaggtcgaggtcatcagccaattgactggcctccgcagcgatctccagaagaagactaaggagatcaagagtctttcgggcgatttcaagaataccgtcaacaaggagatcgacggcacgcgcagatctgtacgaaacttgcatgaggctcttgggcttgtcgataccgatgcctctgcgacatcgggcaaaggtgatccattcatcctgcgcctgcacgtggagaaacaggtcgagaaacagattgaggaggagaactacttgcatcgggtttgtgatggcttcccctcatactagttgcctgtctaatgttgctttcataggcattcttgaacctggagaattctggtcgtgaactggaggggattgtcgtgagcgagatccaaaaagcatacaatgcttatgctagtatcctccgacgtgaagccaatgaagctcttgacactgttgagaagcttcaggcgggtccgatctccatgccccaggatcacgagtggaaccagtttgtcgccgacacagatgagctcgttgacccccggattcctctccgggatgtggagagcatcacctaccttggcaagggtcatccagctgctgccgaagtccgggctgggatgttggagcgcaagagcaagtatctcaagagttatactcctggctggtgagtaccccttttttttggtgcggtttgaacccattttctaatcgattccaggtatgttttgtcgccgacgcatctccacgagttcaagtcggcggatcgtgtggcatggcagacgcccgtcatgtcgctttatctgccggagcagaaactcggctcccactcgcaggaagattcaagctcccacaagttcatgctgaagggtcgacagacaggcgcaatgcaccgaggccactcatgggtcttccgcgccgaatctcacgagaccatgatgtcctggtatgaagatatcgagggcttgagcaacatgacgggggaggcacgaaatgccttcgtccgacagcacgtccgcagcgtgagtggaaggtcgatgaacaacgaggtaatggaagatgacgaagccgaccgcactccatactccgcgggctctgcggtcatggctcaagaccgacccacatcctcgcgccaggctggaggggcgtttcccagcgacgtccaacttgaccggaacctccaggggaccttgtcaccttccagcggggacagctccgctggcagagacatgttaggagctactgggtccttccccgacgggtccagtgcagttgatgacaacttgcgaccagtagctagccgcgagggagacagttcctaccaaagctacgggtccaacgaaggggccaatgaaaagactcgccccaaagttacccaacatgatagctactacggcgactggatcggcccgtccgtgatagtggccaagcagaggcagagccagcagctggaaaactcgaaccaggatgaccgcgagatccggtctgatggggaccaggcttctctcgccgccatcgcgggtgtcggtattgctgatcgtcgcgatcactccgctcctgcccagattgatcgccgggagagtgtctctacggcacctacgaacactaatgcgaccgaattcacaaacaataccaatcctacctcggtagatgaccaggagctcgagctccctaagacccagacccatggccttgggaatggatctatcaaccaaggtccggagtcagacagtgcagccaagattccatccgacttgctgcgttccaatacagacaacactgttgccctggacatgaagatgcctggccgttatcctcgtaccaatgtggcagcataggtcgctaaccctctctttctctctcctcatctccacatttgtctcttcattttttacttaccccatcttttctattttcttcgatattctcttctgtctgtacatgtaccactccttgccctttaacaactcgtccttgtccgctcaaggcgtcttgatcctctcgttgggacagtttccacacaggtcccgtctctccacagcataaaagtgctgcatcggcgttcgttttaccggcagggggtgtggcgcaatggatttctttgattcttgattcttgattttgtggattgtttattgattcccagtgctgggcacttagcacccatttctttcgtttcccggtgggacttattgttcgaggttttcatattgaagtcttcggcttcttttttcttttttaagttacaaatgaatatggttcaggtgaaacattgaattgacgtagtcttcgaaaggatacaggccgtggcaatttagtaactgaaatacgctgtgcagccagtcatgagtgcagatgcccactgtatgttggcgcgcaggttgttgagatgcacgataagagcgataaggctctgtatggtcagccctggaggaccttctccgtacatagatgtacataagtgcagtacataaatcatagtttgggttattgtccttggctttcgggatgaaagagggaatgtatatctacattatcatctaatggattcattcctaactaccattatagctatatacagatgtatacaattcaaatcttaagctatatgccgaggcggtgacgggttttgcccgaggtgctctaagtacatatcggaattctgtattttcttctctccatgatatttccccaagagtctttgtaacgatccggaatccaacccgtggacaaacacctctgcctatttatctcttcaactcctcatctccccacctttcttctttgtactacattcaatcttcttacctccacgctccatcgagcccggaatcatgggtaggttcttcgtgtcctcttttttccccgtatctttgtattactcgtttcaatgtcgttactctcatccgcctggtacactcgaaggtccccggtcatttcaggccttcgcccaatcaccgtgtcttgtctcccacccaaacgttgaaccttgacgcctgatcctttcatcttcccccgcttcctctcttttccctattcctttctatctttttggtttcttgagattctccgctaacagcctcatccgtccagccgacgtctatcgaccataccaagtaagtttaccgagaacctcgtttcctttttgtcttcccatttcccgattctacaaacaattccactgtcgcgcatggcaactcaagtccgtatcgatgatcggaagactctggtgcgggggtggaaaccgccatgcctgttcgaggtcggatatcttccagatctggagatctatgggcctgaaggggaaaccactttgaccgtcgcattgttcgatttcaaataattgcgatgtgtgcgcaaataagatctgccagtggccccaagctcctaccccggaggtcctcattgcatatgagacaaacacccccctcagagctggtggtcacctgaccaacgccgaggatcccgacccccctcgggttacgccttccacgggtagcgattgcttactgaacacgaacacgtctttcgctcctttccatctccattccatcaaaatcataacattgcgccgcttttgcgaccgccttcttctaccttttgttcatgtctgaccacatccagcgtgagaggtctcgctcgccccgtcgccgttcttctcgcagtcctccccgacgcactcgccgttcgtactcccctcgcagtcgctctcgcagccgcggtgagcgtgacgaataccgtcgttccgagcgccgttcgcgatcccctttgagtgcttccggagcagcagctggacccccaggctcaggctctccattcggtggacgcagtggatacccccccgctcgatttgaggaccgcaccgttgccaaggagaatatgatgcagaccgttcgcgattcgtcccagcaagaccgccgggtctatgtgggcaacctttcgtatgatgtcaagtggcatcatctcaaggattttatgagacagggtgagcagggtcgcgtattgggaatggtgatttgttggaatgtttgaagctaaccagggttgtgatttcgtgtcttacagctggagaagttctctttgccgatgttttgcttcttcctaatggaatgtcgaaggtgggcgcttatacgtagaggggctagttccttctatttcccccgattttcgtggtttgtgtagggttgacgggtggacattggctgtcctgatattgtagggatgcgggtgagtactttcttgtctttcttcagttgaacgccttcgctaacatatctactaggattgtggaatatgcaaccagggaccaagcacagaacgctgtgaatacgctcagcaaccagagcttgatgggtcgccttgtttatgttcgtgaggtatgtgtccgcagaatccatggtgttgcgatttacaagtactgatctcagtcctcaggaccgtgaatccgagccccgtttcgttggtggtcccccacgcggagatttcggccccggtgcccgaggtggattcggtggtggcttcggaggccccccaggtgctggtggtgtccgccagatttatgtttcaaacgtttgtcccctctttttagcccccgttacgctaagttctggcaggccttgttgaccgttcggtgtagcttcctttcaacgttggctggcaagacttgaaggatctattccgctcagctggtaagtgcagatcaaacgccccttggacttggattcctacttttctgtctagtgtgagtgcacggtaaattgacccggatttccgtattacagcccagcagggtgccgtcatccgtgccgatgtgcacaccgaccctaccggacgtcccaagggctctggcattgttgctttcgagtctcctgatgatgcgcgcaacgccattgcgcagtttaacggatatgattggcagggtcgtgctcttgaagttcgtgaagatcgtttcgctggtggtggccccggcttcggtggtcgtggtggctttggcggtggctttggcggtcgtggcggctttggcggtcccatgggccgtggaggcttcgctggtcgcggaggcttcggtggcgggttccctggacgtggcggcttcggtggtccccctggcggccacggtggctaccccggtggatttgacggtgctcctcccgttccctccggaccccccaaccctttcactgattatgccacttcgaacggcgagaagagcgccgtcatctatgttcgcaacgtaagttttgggaatacgcaatgggcaactatatggaatgctaacttgaatccagttgccctggtctacttgcaatgaggacttgatcgacctgttctccaccatcggtaaagttgagcgcgctgaaatccagtacgagcccaacggccgctcccgcggtactggtgtcgttcaatttgatactcccgacactgctgaaactgcgattggtatgtctcatttgtattgcagctgccatatccacatactaatattttctctcccacagccaagttctctggttaccagtacggtggtcgtcctctgggcatcaccttcgtgaagtacatgaacgccggccctgctccggaagaaatgatggaaggccaagagtcggccgtcggtctgacccaggaccagatcatgtaaagcgctttcgtccgtgttttacctagtcactttctttgacaggggggcgtctggcttgtttctttcgcaatttcttcgttcatgattcccttattcccatttcagttcttgcgtggcttcgttctcgcaaaatgggtttcgagtgcccgtttgggctgatcaactgcttccaaaatgaaatgagctattttcttccactttcttttccgtagtccttgtagttcccttatcattcaggaattggtatttcagtattggagcttacagagcgttagtctaagggtaagttgccggtttgtcttgcgcccatggcgtcgccgttcgtttcccgccgcgcttttgctttttccatcttctcttttttcctggtggacctatttataccagccctttttcgtcttacagacctaccttcaatgttcgtttctaatcacgtgacacttattgttctgcatttagcgatacaaagaaccatttctcttaaccttggacctaaggtccttagtagtgacctacttccaggatatagctacacttacgattccaaggttggacttcaataagagctcttagtataccactaatgtcatgtaatgatcccattttgagatcccaatgttatcgatctgaaaatgtggttaagtatgtagctttcggtagcacttgtatctttagtatgtgtgtcccataaaaggggcacagccatggatagacacaaagcaattatagacgtcaagtctatttatatgtacatgtgtatgtagcaatcaaaatgtgtgtaaaacatgcctaaataccatacatctgattctacacacagatccaattggatcttatactatagacgcacggaccaacatcccaatcccatctccaacaatcgcatcttcacatccactccattgttcctcccaaccacaccataaccatggcctacctcacccgcactctcccaaaaagggtcttcaccccctccctaccccaatccatccgccaaacccgagcaataaccataacaacactccaacccaccccaacccgtccaacacaaaccacccgaacaagcaaacccagacaactcccccagcgaacctaccactcagccctccacgccaggctcccagaccactcctacacaaactcccaaacagcaatcctaacctcagcgctagcccacgtccccgcgcacggcttcacagccacggcactgaccctcggcgcgcgggacgccggcttcctcgacgtctcagtgcagctactcccgcgcgcggaattcgacctcatccttttctggcttgctagtcgacggggtctgctacgcggtcaggtcgaggagggcgggttattccggcgcattgcggcggagaaagggaaggatattcatgagcttagtgttgaggagagggtgaggggactgattttggagagattgaggatgaatgcggaggttaagggtgtctggcaggatgtgagttttttttctctttctttctgctcttttcttttaagattctttgaaggggatacatgcagaatgcgaacattgttatgttgaatggaattggaggtccatactaatccatgttttgctaggctcttgcgcaaatgtcccttcttgctaatatcccactctctcttacggaattgcacgccctcgcttcggatatccttactctttctggtgacgatgctgttgatgcgacttggtacacgcgccgtcttgcggtgtcggctatctatgccagtgctgaggttgttatgacccgtgacccgacgccggatcttgtggagacggaggcgttcgtggagcgtcggtttgaggatcggaaggtgattgctgataagcttattggtattggacagtgtgctgggtttgggtggaatactgccattgggctggggcgaagttggggattgaagatttgaggtcattttggaatgagcctctctttattcttggtattgatgacgagcgcctacttgaggtcctcgagggaagtcaactgaggcaggttttgctcggtgggagatggatttgtacttttattcttactatatattattgtaaactactccattcttgtcagcgaaaatactctatttgttattctgggatccagtcctcgctggagtccccacaaatatccatgtcatgcaatataaccagagacataacctattatgtcccaacctgttcacccgaacagccgcgcttgatgccaaaagaaaaccagaaaatgagccacgagcaaagagtatatctaatcatgaaaataaagcgaatcaagcagatcgagaagcaacgctcagtgcagagagacattctgcactgcctcctcaacactgagaggcgcatggtcattgccagcaccattggctggggcgtctgccttgtctgcagtagtctcggacggtgacaccaatattgttggggattttggcgagaacggatctgaaactacactgccctctggggactgttcctgttgagcgggcagggcggtattttcagcagtctcgggctccttcgatggactaacactgctggccccgctttcaaccgagtcactctgtccgtgctggggcttgccacgtccccaacggcgcgttttcggcggaagtggagcctgcccatgtcggcctgctccggctatgggccggtggtgacttgaggaaggtgtgctatagttggaacggcgtggtggcgggagggccgggggtggattcgacacggcccgccgcggccgtgaacccgggggcgcaagagtggaacctgacccggagccgcggcgatcgctggcatgtgtctggggcggtggtgtgttggtggtgaaagtggtggtggggctgacttcgacaccttcggggatagtgtttccgtcgctgcttgtggcagagtggttctcttcttcatccacagccagacggcgcccgcgccagcggcgagatttcggtggttctggtttgacctttggtggtttgattattggcgtctcgccattgggagcggcggcagggactccgtccttgcggctgggagtgattatgcctggtttttcgtgctgtgctgcaacggcctgaacgctcagtgaagatgcggatgcgggctccaggttcatgccaagccgttgggctaagctgtgtttccgactcccaggtgcgttggacgaaccatacgagtccattcgcgtaggtgatgttgtgtcaggtgagctagcgattgtgcttgctcgcgagagtgtgcgaggggcgtcgagtggttcgccgatgtctacgggtgacgcatgctgctcgccttggtccaggacagtatcaattgtagttgctgtcacctgtgtaggagtgtcctgtgattctgctgcgtcggtctgttcggcattgcgcaaccaatccactgtcgaacaccgagcgacaagtcgacgtgtcgtttcatcgacctcttcgaaatgcatgattttctcatgttctgggtcgttcccgtatgagacttggccccgaacaagaacgctgagtagtcttcggagcccatcgcgcttgtagtggggcgggtgtcgtagctgtgtgtgagctagaagcgggtaaagaacacgcaggtaagtatgtcgcagtgccgaggcctcctcgggtagatcaagcagattccggatcaatatatcgaccagaacgtgtaggtcattggtgaagaagtactcgtatgtgctgggggtggtaaagatgagatagagaagcttcaatgtgagcaactggagggacgtctcggctgcatgttgtcagtcatcggatttattgaacaggaggatcgcccgttaccttcacggttgataagaagaatgatgttctctccgaatgtcttgtacatcccaccatacatggataggaccttgataaccttgttggtcaattgaccagtgggtcggccatccaccggatcgtgggccgagatcatgaattgctcgttcagaaccagctgtggaatttgtcaatcccattccaaccaaaatgagcccgaagagagtactcaccagcacccgaatcacgggataatgatacggatcggtaacatcgtatgagaggtcctcgatgatatcaaagagacagcgaatgaaatcgtcatccacgagaactgcacacaatcccataatcagctactagcagcagcacctgtgtatccaggacgcacccaagtcttcaattttgaccctttgtatcctcgacatctcgtatacaagatccatcaacaagcgatggagacccgcgtcgccgtctagatccgccctccgcatcgcctgtataagctcgaggagacgcgcaaacgcgccctcctcattcagcatctgaagcacaacttcattctgtcgtccgtcgaagaggatgaatgatgcaatgaagtggagggtattcgggtcatcgtcctgcaacagaccgtagaagatctgtcgtcgcacgtagtccgcatgtgtggcaaagatactcgacgtaaaaagcttgtaggaacagcgggcgatatcggtttccgaccggaggtattcatctagggaagggcgggtgtgttagtcgcagtggaagcagtggaagcaaagttgggggcggacgtggcgctgttcgcaggactgtgtcgggatagggatatcgcttctcggagatcgaggtgtcgtttacctttgtgttgagtcgttagattaagataagctcggagggcgtcgtcgatctggtcttcggagtcacaaggcttggagacgatcgtttgaagttctgcaagaaccggtcaattgtcattgtcgcattatcttgaaaggagaaaacaggctgagaacaccgtaccagtccagaactcagtctccgagacctcaggctccatttcccgtcagacagctcatgccggtttatgtgccggtttgaagagttggagagagttgaagggcgggggaattggggggaattcgagagtcccactgcgggtcaaccctaaggtacgcactacattactacgaggatcatcgacactatgtacgtgttatagaagaacttccattggtatcaaaatgcaaaacacaattatgcagtcgggcgcaggaagggatgcgcttcggtatttctgtaaaagtcagttgttggtccattgtttacagggctacgtcaatcacttacagaacatatttatccaagtctacgacagtagggtcgctgaacaaaaggtagaaatacttcagtgtctcagacagccagaaagactccatcgtatctttatggatcggtttctgggctgtgacatcgtggatggcggcgttgccaagctccgttcgggtatacttcgagatggcctcgaacatctgccaccccttgcgacgccaagattcgtcaccagtcagacggtacatgataaagactgactcaattgcctcgggccgaaggtaatagttcggtgacgggatactggtcatgcctgctgggaggtggtctttgccgacttcagcgatgtggggcgaagcgggcgatgaagatgaacgaggtgcatctcggttctgtagatcagttccactgggactagcagtcggaattgaagcaacggacgatgcttccgcacgcttttccaatgcgatgcgatcgcgcttggccaacacatcgctctcgtggggatttaatgagcccggcatgggcaagggaattgacccgctcgcggatccttgctgtggatcgtgtgcgatcaagtccacacgttgtccgtagctggtctctccattgcggaacgaatgtcctgccccggggtctacgcgcgagtagcgtgccacgccagcgtcaaagcgggcttgatcccactcacaggccgagcctttctcacaaggcaagaggcggaagcgttcaggcatcactccggtctgtgtcgactcgtaagcccaaacacaaccgtcggtcagtttgcctgcaagttccagatcaccatcgatgccaaaggccttggctcctatggcgaacatgccgccgacgaaacatgtcaagtgagcgccttcgtatcgaagatcagtaggagtgacctctgcgacctttccaggtgtcattggagtagttgaggccatgaatcggatatcacgtccacctttcaccatgggctggaagagaagagtctgacgggctgcagtggctgcctttttatacatattcaggtattgctcgttcaggccacccagtagcaggtattccttgggaaggtattcgtaggtcgagtcagccattcctcccatggtgtattcgttatcgcggggtgaattgggaagacgcaagccgccattgcattgatctgctgatagcgtagtctgctcccgtgcctgaatgccaggttcactcgcgactcgcgtatcattggcagcttgggaatgtctttcaatgtcagcgtccgtgtcgcgcgggatcagcttcaaataactctcaaggtctgtcggtgcagcgtaagtcttgcgggtcatcgtagtaccgctctcggttgtactagcggcgtgctgctcgcgcgtaggactgttatcacgtggaggtgtgttaggtgtgttcttgaagtacttagaacatccctgtgcattgacccgcagaggccacagtccagggatgctagtcgaatcttgaatcttctccaattcgtttgtaatccgtgcaatcgcatcatagtatttgtcccgcttggtcaattgagccaaacgggtaaattccaaggaaagcgacccaatctcagccaggccagctcgggaagacgcccgatgcggtctcgcagcatactctctggaaaggatttggtcagtcgtcgcccatagataatcagagataaattgagactcacggggcccagcgatagtaaaggtgcggcatgcggttaggtgtgtcaaaggcaccgatgagaacctcagcaagctcctctgctttctccaaaagcaccgggtatcgatgaccagaaatatcataggcacccaaaagacctccaagataacggatggttgtctcaaacatcggaatatctgctctcagtgatgtcttgaagtcaatgtttttgatcacatccaaagcctcggagaattcatccttcaattgcataatccagagagtatcaatggaatcaaccaaggtcgccccccacccattgaatggatcctcaagctccttcgacagaggcttgacttcgtcatgtcccattgcgatctccttgtaacctttccaggcatgcgtgaactcggcctttataacgctaagccgttgcagacgctcttgcttgtcagagctcgattcatccttgaacttcgcttgcagcttgggaattgctttcggctgttcctttggcagcctgatcacctcctctgcagggacggggaaccgctctgggaacttcctccacttggccgtgggaataccaggctcagggcgctccgctgcccttctgcctgtccctccattatctatttcctccccatttgaactatcggtattcgccgttgtaggtggtgccaagctgtcggtgctctccacctgcgccggttccttcacgggttccttcgtggagcccttcgtggagtctttggcgtcatccttgatgggtgttttcaccggaatgtccgaggcatctttaaaccggccgccatcctttgagccactgttaggacccacgggcgagattatcttctctggctgtggtggggaggtggagccgcggtagggatcgggaagcacgcggtttcgactctcctcgatggcggcagcaacggccgggttttcaggtttttgtgcgtcgggctgattcggatgggcagcatcgggtgtatgaacgcccgtagacttttcaatcactgtatagctccaatcgcgtgaccgcgcaaagtggaagaatgtgaagacaacagccgccgcgaatatgaccagaactcggtatcggcgagctcgaaacatcgcgagcggtcacccttcaggttgtattcttattcaatgaaaaaaaaaataaaggagaggaaagaggaatgaagaaaaacaacttaggaaattagccaagtccagatgaaatcacgagactccacaagtaaaaagatccacaggcgagagcctccgcgttctattttggtctttgctgttatttttgacatcttcagcttgttccattctatgctgcttcctttgtggttttctgactttctatctcttatctaaagaaagaaatctccttattctccaatgatctcaatcgcaacaattccatgcccaggaagaccggggttctcgggtctcaagacatagtggggattgccagacgccatcattttagggcgtatgaacagggctggtcgacgccgatcattggccccggattccggactttgactctggattatatgcaacccgcaagggtttgcaaattggcctatcatcaatcgactcttccactagcccagatgaaagtgctgcctccgtctcaaaacgtgttccacagggctcacctcacatattgtgctacttacccctgcagcctacatatcactccgatattttgtgtgatattgcatgctcgtggagcatcgacaattcgggagaatatatataccctatacataatgctcaagtacaattatcttgatgcagcattatgaaccaataaaactgacatgtgaatagcgtcggcccggggcccgctggtattctatataaggggtcaggagaataaatccaccaacatagctaatattagaatgggcgaaggtatccaagaactcgcgggcaaccatgagtcaatattatagtcgatcgggatcttagtttccagccatcaattgcatatgagtacattggtactttatgatttgtgttgcacgtcggcagttgtctgatggtcagcatctcgaaccacctgtggcacccactctgacaaggcgccaagcctttctccatcgatgaatttctctaagcatctggctatgttcatctacgtttatgcagacattgcaatgaaaagttggtatgttctattagctgtatatccaggatatgttcagcaagaacgatatttagaaacgtgggagggttagtgcaggtgctggggtatatcagtcgtgaatataagtgccttctgatgtgcattatgcacacggccatcctgtacatatttacatatttctaccttatatatgtgtgcattacgactaccaacacactacctactacctacatcataacagacaatggcacgatagagaagcataaaaacgttcgccaggtgacactgaactccgcatgaaatggtcagatatcgtgtctgaagcagataagctatggtcttcctgggcctaccaatgtcctagaagatgcatggagaacggatatctaaatgcccacatttgtccgtctgccttcggtgttagctttctggaactgctgaattaagcccaaaacgccgcccccgccagcgatggcgtcaatattttcgccttcatcgccctcatcctcgtcgttgctgagcgggttcatgcgccaagaatcgccgaggttgctgtcactagtgcctgcacctgcactggaagtgcctgtacgagcaccggactgccgtgttgttgaatcatggccgtcttgggatagcggttcttcctcgtcgtcgataggatccgttgacggatgatgggagcgtccgagccgggagcgctggtgctgctgaggggcgattcgggctgcggcgcggaagccggtggtcgagggttggtggtgcgggtcaagcaggatggacggggcaggagagcggtggtcgaatcctcccatttgccttggcttagaggtgccaatcattgattgagggccgaatggcgcaccaggggtcggcccaaggcgtgtctggagatggtcagggcgatcaggaagagcaccgaacccgcctgcagtgggcgatccgagggttggcaaggttggtggtgggtggaatggtcgccgactggtagcttgatgagtggtaccgtagttgtccaagaagccatagtaggaagctagcatcttgccgtctttagtggagaagtagtcggtgcgcagatcttgtttgccagggtcccggcgccctggtccggcttgggagagaacgttggtgcccttcttgaagtcgaagactgcaaaagaacagagatagcctacaccgtcaacgtgtacggtgaactctcggaagaagtcaatgagccggtcactgcacttgggcaagctgaaccacaggacgaaaggagtgaaaatcatgctcaagatttcttctaagaatatcacaattttcatttgatagagaattgcgaattctttccgcacgtcgtcgctgtgcaaacggcccttccatccggacgggaaataatgtgtaaagtcgatcagctccaggagtgcgtactcggggtcgaagacgtcggtctcttcgggtgccagccctcgcgcaaaagcccagactgttccgaaaataccaagatagaacagcacagtccggtcatgagtaatctcaaacccaaggaagagctctggatcgatcaccgaggcaagggccaacactgatgcgagagccccagagataaaagcaacgaaacgtgccacttggacggtcttatccttgggaaactggtcaatgtagcgactggcgaatggataagacatgttaatccgacgctcaaagagatgccaaagctcattgaactcgcgaaatttccattccgccataggtgtatattggcgggaaccgatttggcccggattcttcttaaactcgttgaagtaccggaagaagtagtgcatcataaaatagaccacgataaagggtgctacgaaaatgttcatgacgccagcgaaaataaagcgccgacgcaagccatcactcagtgctcttcgatgcgtgtccttgaggaacagggttcgtagttggccctgctcattaaagacatagtccatgacacaaagattgagattccattccatggttcgggagaaaagttgtcgatttttgaggaatggaatagggagagtgaggtccaaaatatccttgtttaccaaagcgatcatataattctcttttctcatcaggcggttagcaatgtcgtgagcgtccatgcgctgctttgactggctgcccaggaatcttcgatgtttggcagaaaccgccgccgcggtagatggatttgagtctctcaacgccatcagccgactgaccacttcttgccaggaaatcgtctgaacctcggcatctgaaacgccgagcaagtagagatagaagtcatgcaggtgtttgagcctgcggatgtctagtaggtattggaaaagcttcccgatccagaagaagctgaagagccacaacaaaaatgtggacgacccggacatattcgctgtgcattggggcacgaggatatcattcagagtcttgctccgccggaccttgggataatcaatgcagttggttaagaatgtcgagaaaccaacaacgaatgcaaatgtcctatgtgtactgtcagattctcctatgattctttgaaaaggggattaatatcggcttacaagagattcagcacccgggtcaacaaaatagaccaaattccgttgcctaagaagtatacgtagacatccttcaagaaattatccaaatcctcgacgtttgcccaccgccacattgctttcttcttagggtcaacattggcaagaccggggtgttggccagtaaaccatctccctatgggatgaccgctttcacttggcggtggttgttgatggactcctcgttcattccagcgggcttccgtaggtcgcgaggacgggccaggactcggggttcttcgtcgatccgagcgattatgagactggggaggaggaggtaaccgtggcttcagatcttcgtgatgaccttctaccagcagagactgaggaacatcttcatcatgatcatcgagctcatagccgagtggcgattcttgtgccatccaccgaggccgggacgacttgcgacggcgggtgccagatggagaagcgcgctcttcaggtgccttgaccgaccgtgcttggttgagcaacgcagtgctggggctgactatctcactatcctgtgcatcggctagtgcatcctccagttcccggtcactatattgttcctgttggtcttctatgaccaagcccgcacgttcttcgagatcagagtattcggacccggcgtcatgttggcgaatagtctcgtagaccgatggtgagccagttgggggtaggaatcgtgataatatgttagaagacatcattttgaatcagactgaaggctatagtcagaccactcatggcaacagcttcagaagccagtgatagtggtgatgaaatgccatccagcgacgcttgataatgcggagtaatgaggatcgctatcaatacagcaggctgagtattatcgggtgggaaatgggtatgtgtcctgattaagataattgtatcagcttataaagaagtatgcatctgacctagtcctcgtggtaacagtcaccaggagctgtgatcattccctagacctgatagctatgatgacataaagaaggggggaacgggcttggcgcctcaggcagttatctaaaagtcagtcacgtgggctgcaggtcagcagcccacctgttaagctttccaaaggttatcatcctctgcacccattggaactcataactacttcctttattgggcacatcagtttgttttaggctgtgtgtgtgtatagctcaaggatttcagaagttattcataatgactctagtctgtctcttatgtcgccggacgactggctgccgacagcctgtgagattgggaattttgattctggagacttatgggattaataaccttgaagcaacagtcttcatgttgtacaatctctatagaaaaaatcattgccttgcttccagtaatcctccccattggcaaccctccgtatgtatcctcctacgctacctaggtagctccgacgtgggtggagtagttgcttttatagcctcagatcgggatcactggcttccctaagtagtagaagttgcttatattattgctatcctggtatcttcctatgttatgttgatttattagtttgtgttgaattcttcaaaaccagatgtccttatacgtatatccacacccattatcctcaatctgaactgagtctgtaatcctggtcgaagatcttatttttggctccactttcggggatttccctcaatctgttttagtaggagacttcgactacaactttgtgtagagcaaatcatcggtatattgtatctactccgtactcccgtgagtgtttgctcaggttctgtacgtacccacttctagttaggaccaggatctgcgccccgggcaccacgttgggatgtttgcatattgcagagaacaggccatacggaaacggatttcgtaagtgcaagtatgtggaaactgggaatcgcgggacttgaataaattcatataatatatcggatgcacggccaaaaaccgatgtctcaagcataacccccatgactcgagattagtggccccatttccactagtccggtagtccactagccagtgcgagtcagcgaaaaagacgccatgcagtaatctcttctagaaagtctctcggcagtttaagaccatcgggaatccgaatggaaggggggaaacatgcacgctagtgaattggggaaagctattgatcttggtgttctcaagttcagcttaaacgttatttactatacttaggtacttccctagccccgattgcttgtgcaatatatactcggtatcttcggttaaaggctgaaagctaaaaggccgggatttggatctccatgtacggagtacagagcagatcaatagtccgagcttgctctggggataatttaggatgtatgttggatgtatatggaggtgatgccatccatgttgcgctgtcatcgatgtagcctaaaacattctatagaataaagagatatagctgatattagaacttgaagaaaactccagagaccatatgtgtaaaagggtcaagtgttgccattgccattcctcatttatttttcccctatacaaactcagctccgctatccacttctttctctcccctccccctcccctctctatctctctctctctctctctctttctcttttcctctggcggttggcgatcttcaccgtatcttcccgttgaaatttcaactcgattcttcatttatggggaatattttttctttgaagcccttcccctcattctgcccccgtcccaaagcggcctacatttgctggaatccgcgacacatatacgcacacacaaacaccctctcctagagagcataatcaaaacctcccaatttcaaaagggactgatgaaggtgtgtgcgcatctctttaatccctataccctctcagcttcccctcccctcccctccctcctataataatgatatcacgcccttcccaccaatttctcccgggtcgctttttcccaaggactatcactgacactgacagcgacactatcactatcgactggccggaggattggacgctcaccgcattcgctaggttctcctgcatctctcagacaaacgacggtgacccgcgcctcctttgtcctggtctcccattccttcccctcttccggcgcctggaccgaatgtgcgaccccgatacccaacctctcattggactccatgtggtctcataacaatttcctggacaaaaagcgactctcaattatacaagcgcagccgtgccgcatacgtcgggtgccaacaaggtcttctttcaccgattgtttcgagggaggttgtgttgggcgcgagtagggagtgaatctgttctctcctttcctcatatattgacgagtttcattttcgttttgtgtccatcgcttgtcgagggggctgtctataaccgaacgagatggaccccgagaatccgaacgcgttcaagcggagctccatgcaccaagcactatacagtcgtccagtggaacggcgtgcaagcaagaagtcttcatctagggatcggcatggtatggtctatcccgacagtttccgagacactagcattcgaactgtgacgccagagtcgcactcccccgccaaccattcccctttatccgaaccggagcacctcacgggtgcttcctcttcgcctcgaaataccgtacgaccacggcccaacgaacccgaacgtcgccgagatttcaacaagcactcatctggggcaggcgaagaagatcccccggcggaagcaaggagtcaacgggcgcgatcgcggacaacggcagctgaggagcaacgcaacgacatcacccctagcaccttcaaagctcgaacgcgggtcgggtcaattaacacagccagtccgtctcaaccaaaattgcctgaagatccctcgtcatccatcggttttccgtcgattgagaccccgaaatacagcagccagaccgtccctcgccatcgactgagtaaagctgccggcctggtcgccggtggagcacaaaatcaagactcgttttcctcacccctctcgggcgcggaagcaacaaagatcctgcagttgatgaagactacctgtggtagaatgcatggaatcctatcctttcgaacagcctcaaccactgcctggacatccggatactgcgccattaacgtcgctactggaagtctcatttaccaagccaagggggagccggcattggccaaaacgttaattcccgatctacgtggttgtcgagttcgtacactgtgggatcctgagctccaatgcacctatctgagcgtccacacatttacctctgggcttgggatacaactgcgacctcacgtgaacgagacctttgattcctggcttgcagctctactttgctggcaaccaattcggcccaaaggtgttcagaacaagatgacaaagcctcaagaggttgtgattggagaccgccggattcccgaacgtcgacgcaactcggaaagtgcggcacaaaaggatgcaactatcatcaaagttggcaagatgcttctatgggacaagccgtctgcttccggtgcaatgccggtgtccggacgccgcgtgtccacgtacagacagtcaagggccctttcttcctcatggcagaaggtgagctgcacactacaggaaaacggcttttttaaactctacacggaatccgacgtggctctcctggcgtgtgtgcagttatctcaattatcgcgctgcgctattcagcaactggacccctcggtgttggatgatgagttttgcattgctatctaccctcaatatacggcacacccagtatccgattccaacctgcggcctatataccttgctcttgaaagccgcgttctctttgaggtatggtttgtgcttctccgcgcattcacaatcccagaactttacggtcctgtgtctcagggagaggatcccgataaaacgccagaagctgagaccaccgacccaccctcgaccaaagacatgttccggattgaacgattcttgagcttgaaaattgtggaggcgaagctgtttcgtgccagagaggaagacactccccggagccgaaaggcatcaagatcacatggcatgcctgtctcaagctcgaaggccagcgactattacacggaggtgcttctagatggggaaattcgtggcaagactgctgtgaaatatcgcaccatgaatcctttctggcgggaagatttcctcttccctgatctgccgccagtactatcacaagcctctatcctcgtcaaaactcttaatccgacacagagagactggacacttgtcgccaacggaacatacgcacccaatcaagatgtgagtgctatgaacatgctggatgagatcgagatttctgcaaatgacatcatcttcggacgggtagacctgcgacttgaagaattggaagccggcgtggatatcgaaaagtggtggcctatcctggataatcaagaccaggcaattggcgagatgttcatgagagcccggatggaggaaaccgttgtcttgatgtccgatgagtactcggcgatgtcggaacttctccactccttcaccaatggcctcacaataaacatggcacaactgatgtcatcggagctaaatcacctggccgagatgcttttgaacatctaccaggtctcggggtcaacggtggaatggatctcagccttggttgaagatgaaatcgatggggtccacaaagaatccaccaccaaccggctgaggtatacgacgaggattcattcgaacaactcacaggagactagtcaagagcgcgaggtccttgtcagggacatgggaaggacggccactgtggaggctaacctcttgtttcgtggaaactcacttctaaccaaggccctcgatcttcacatgcgtcgtttgggcaagcagtatttggaggagactatcgcggaacgactacgtgatatcgatgagagcgatccggaatgcgaagtcgatccatctcgagttccacgccatgaggatcttgatcgcaactggcgaaaccttacagccctcactacaagcgtgtggaactccattgcgggatctgcgtcgaggtgtcctccagaactgcgccgcatcttccggcatgttagggcatgtgcagacgatcgctatggtgacttcctccggtctgtgacgtacagtagtgtttctggtttcctgttcctacgctttttctgcccggccattctgaacccgaagcttttcggcctcttgaaaggtatagaatacgcccgtatcttggtgttttttttttttttttttttctttttgctaaccacctccagatcaccctcgtcctcgtgcacagcgaactttgaccctcattgccaaagctttgcagggtctggccaatatgacaacattcggcaataaagaaccttggatggaaccgatgaacaaattcctcgtcgctcatcgctcggaattcaaggactttgttgattcggtttgtgctatccccgccgaccgaccagttcctgtcgtcacaccctcctacaccactcccatccaaatccttgggcggttgccgcccacatcgcgtgagggattccctagccttccatttctcattgactatgctcgctccttcgcaaacttgatacgtgtctggcttgacatctcccccgaacgactcaacgaattgaccgagctggacgttagcctggctaagttccagaaagaagcccttcgcttgcaggcacgcactgaggagtgtctcagacgagcagagcaagccgagcggccaaatgggaaccttgagatcaaatgggaagcactggtggattcgatggaacgacccgtaaccttctacgacgaaagctcaagcaaacccagtaccccggcgccagaaacgtcaactagtactgcaccggccccaagcagccatcgcaattcgattggctactttgctacgcgtcctgcacttccccgccggtccactgaccacgtccccgatgccgaggatgacacacccccaagctcatcatcggcgacttgggaccaaagccgcattccattctccatcccacgttggtccgacccacgcgacagcaccggaagctcgaagaactcctcgacctactcgctcgagaactccgattcctccaaggcacgcagggccagcgtcacgaaagagtcctcctcgagcaagtaccgcttctttgactttgttcctgcaccctcccgacgcaaggccaaggaccgtgaccagaatcaaaaccactcgcacgaggatctacgcaatgaatcttaatgcaccaatgtctgcccatgcaatctccttttatccttacacgtttttgattttgttcttcctctcctacctctttccatgtgctcatgatttcaacgttcctcttttctccccttctctctctctcaactccccctttccatcttgcctcctcgagttttgttcttcttggtcatctatatgtctatgttctcctctaaagcatgtgtcatggtgttgatacccattccttcttttgattgtgtgtttcatggccccctcccttatacacatctcccccagcccagctctaagataaaacaaagagagctgaaaagtaaggatctggattttttgggaaaggaaaaaaagaacacgatctgattttgaactcggctgaggctcttgtgtttttctcctttttcgtcgtgctgaggaatcatttgatccttttgtgtttggatttcctttggagatggtggccatcgtgtaaataccttttactctttttatattcttccaatagatggaatggattggtgttttcgttttggaaagttgatacacaattgcagtgcttgtaactctgttattagatagaaatggcaacatcagatgctgttcattgagtacctctgtacatcggatcagaacacatatcaaatgtcacctttggccataacaagacagtaggggttaaacagaaccctaggcaacacccctcccacaacaccgcttcgaaagaagatcgaaacacatatcaaaacaattagcaaataagctgtgcagcgacatgctgcaagaaacagcagtaaagatatcagcgaagaatacatcacttccataagcagagcttgccactagcggtgcccccagcaacccagttcttgctacgatggaatacagccacagcaggaacagcggtgatgccgtcgccaccaagctgggcgagctggtcaccactgctactgtacacatcgacaaaacggttcatattgccaatgcagaaccgctggatgggagactgcgggttcagctgccattgaggacggagactataagaaagttagggcttcgtgcttcggcaaacacaaaagggaggaaacataagggaagaagcgataatcatacatggtcacccagcggccagtctggcagttgtggcggacaaccgtatcggggacaaagtccttttctccaagcttgtggccctgcttccacgaagaaaggccctttgcaccaacgtcgtagattttcaacgtgtcatcgtatgacgacgtcgcaatctgcccagcagcattgaaagctgcgtgggagactgacagccggctttcgtgttcagctactggagtgggatcatccggcgagagtttgcgcaagtcccataaccgcaggaatcgatccaaactagccgtcgcgaagtaattgggctgggaaggacacaaggtgaagcccccgattttcttctcggagagttcccagctggacacgttactgtcttttcgtggcgttcgcgtgtcataccgcccgaatccaccttgcaatgtagtccagtacaaggtgttcggatcatcgggtgccatgtctactccggaaagtgcctcgtcaatgttggtagattcgggggcataggtctctgaagacaccatcttctccaagtccagggatcgaatggagctgtcataactggctgtgtacaggtgtgttggctttgatgggttgaccatcattgcgctgatggtccgggtatgtggcttgagggtggtgaggactgggtctgggtcatcgtcgtcttcgtcgtcgtcttcgcccgccaatggcttttcctgagaggcatccaacatgcccagatgacccagtttatcgcccgcgaagatgagaggtttagactccgacgggtgaaaggccatgctgtatacacgctccggggtaatcttgatgcctgtaatggtcgagaatgcgttagaatggtaggttgtcaacatagagagtatagccattacgttgagggtcccaggattcccacaattggagcccattcatctcctcgcgaagggccttcagatctttgtccgttgttttctcaatctcgtcgtctccgaaggtcctttcatagggtttcgcaacacccttggtgatgacatctacgccgatcaagctatcggcgctcagcttttggcccgaaacaaacatatccgcctggctgaacgagtctgtccggcgcatcctcttgagtctatccgcttcgcgcattgcctcatactcgtcgtcggccttgcgctttgctacttcactttcggctgcaatgcccttgaggcgtgaggatgtccgccgaggcgtaacggcctcttcctcggttttcaccttaggagttgggcgctttttcggttttgcgccattggtgccgggagtcttggggcttgcgaagagccccgaggattgagattcgagagtaagttttttcaacagcgcatcgcgctctgcaatgttcgccaaacgctgctgttcaaattccgacaactcacttttccctggcatgttggtttcggggtcttcgggcgtgcttgatttgtatgcagtttgcgcctcgggggtgcgaggcacgtcctcgacacgcgtggaccggttacacgacatcatgtgactttgcgggaacgccgataagcccgtgcttgtgaaaaaagagacgaagtaatcttcttgtcgtttctctttttttggatacaagttgcaaggtttgaacaggtggaagagagaagtaagctctatcaaggttggatttactctgagaagtgcacgaacaaggctgcgcaagtgcagacctaacgacttggcaatggcaacaaatattacccagctatgcttcctctcaaaaagcacttctacagctcctttcctataccacactcgaacacttacgccactctcgtccgcggcccgaaaacaatttaatcgccgtttcctgcgctctttttccattcagaccaacgccgaggccaacgatgcgacggagaacaaagcatcagcggaggacgacagtcaaaatacttctgaacagtcaattgcctccagctcaacgagtgaggtagctccaaaaccgcgacgaagctacctacagaaacgagcagcatctgtatcccaaaggcctagtctcagaccatctgcggtgaagaagacaacgaaaacagcaccaaagatcacaaaccaggagaaaatggtatttggaggactgctagagcagcttggatttaaacacgatggggaaactaccgaggcgagctcattgaagccaatgagcgaggagaagaaggcggagatggccgagctcgtgtcggtattcaacaatctgctcaaagaccccaggcaaaagaaggcggctttaaaagttaaggagcagcagaaggacgactattcttctcatcggagacaagaaaagtcaaaaacggaagaacaagtcccagcggagaatcaaggtccaaagcgaatctatctccgtgatctgggctactccgagcccgccacagccagcgctgccgaagtaaccgtcagcctgcggagggcgattgagatcgtcgtcaaatcagaatcagagcacatcgaattcgcacttttccaagccatcgaggatggcaagggcgacctgggtgtgtgggaggtatgcaaagagcgcatcttctccatgctgcgccacctggacgagcaatctctcgaggaggcttcaaacccagagaatctgagcacaactgaccagtccgaaccacacactcggtcgtcaggacctctccgagtcccagccgtcgtcccagtcgcccccgtcgtggtatctctatacccgaagaccctcctggtcgccttccgcctgctgaacactcacttccgcgattccccgctcatcccccagttccgcccgactatcaaaggctacggccgtgtctctgctttcctcggtgcttcatctggcctatacgatgaattgatccactaccactggcgagtatgcaaggatcttcccgctgtggtatctatcctccgtgagatgaaccagctgggcatcaacccgagcagcaagtcccgcggtatgttgaccggacttatcattcgccaaggccgggacgtggaggctcatcggaaatccccaagtgagaagactttcttctgggacttgccgtctaacaaggaggcattccatgagctcacccgtaaagatgggtggatggatcagatcgaggcgcgttcagaggaagaggcgtggcagcgtcaggcgactcgggctttcccccgctgagctcttgggtcatcttgcacaggttgctttaatgtatagagtgtagactataatgtattataatatcatcagcgaaaccatctcaagcttcatgttaatacaccgttcttcatcattcgactgtaatgctattccaaaagtaatgtatgtacatgaagaatccatcgaaggaaaagaccaaaagccagccctaaagccctagcttgactggaggaaaagaaaccaaaaaggaaatgaaccacccaccataggggtttgtacagagctttcgtgctctacaaacccctatgaatcccccaaaacttttccgcgttgaaggtaaactgattatcctccttccacagatcgtcaaaagcagtaaaaagcaccaaatcctccctccggtaatcaaaactcttcctcaaactcgcaatagccgcatcctgatttttcgccgaaggaatagcaaccccattcgcatccccagcatgcggccagccagactccgtaatcatagtacgcttcccacccgctctcgcagagatactacgcgcctgctcgagcgcatacgcgcccgcaccctcaggccgctgagtagcatcgaagaaagcatggcagtttgcagcgcagtagtcggagacatggcatagttccgggtggtcgagtaggacggagaaggtatctactgtgacgacggggcctttgtagccctgggcgcggagcacggagcgtgctttttgcacggcggccacgacgtcgccggcggagttggtgccggcgtttacaagctcattgccgacggcgatcgtgtggaagattgaccagtcttttttgccgtccgggcctgttactgcgtcgccgaaggcgctgaggcttcctgggaaattggttaggtcgtagacgccggcgaaaacgcgcatgttgtgtcgtcgtgcggcgttggttactgttttcgtttggtcgcagtctgtgccgtagatgcggacgaaggagtattcggagattcggtctaggtcttggtttacttcttcttggttcttgcaggtgcggtctgctttgtatggagagtaggagataccgaagtgggcgtgcgggtgcgggtgcgggtgcttgtgaggatagggatgaggaacgggcggtttggggtgggcatgtgggtgttgtagctccttgggctttcctttggctgggatatggtggtcgttcatgtcatcgttgttcttggatagaacatgtgccggtcctataccggacccatccgtgcctgggattgatattgggggttgctttgatgggggagttagggctggcttctgctgggagataaatatctcttctcttcttcggggacagtcctatctactaacattctcgtgtagtgcaggggtcaaggcctgaacgtagtgagtttccgtgctgatacgctctcccttctcattgacccagacgactacctctttggtaaagggtagttgggcgacatctccacgagattgtttctcaactatggcaaatcagcaaaatccagtataagcatgagattatatccaaggatgaacaatgatgttcttacccccagctttggcgcaaacaccacatgcgagtagcaagccaacaagcgccttgctcaggcgcttcatttccagctgaattcttcctagggaagctgatctgtaaatccctcgagtgaagtggtctgaacttagtctttgaacttagtcgacggcgatcataacatgagtaactttgcaatcatctagaaaaggaaacccacgcatatggtgccgatcggacccattataaccgttctaacagactcgagcacggagttccacctacgtggacttattagcagagcatgtaaaggcaaggatagccaagcatagcgcctcgatctggggaggacatgtggaatggaatctgggagtttccaatttccaaacatgcctattggcttggttggacccctttggcctccgatttcctcggcagagagatcttggttcgggacatcatacaagagctcgaagttggagatggaccgggaatgctcttgatgatggagtagatggaatgcggggcacattctcaggagtgtctcggagacacagagggattcgttaagaatgcgacatagaatgttggccagaagtatctgatattattgagagacattggaaggggccgggggaaggggcagttctagggttgaagcctggcccggacatattaggctttcggtttggtgatgatgctcaggaccatcaaatgaacggcgaggggacatttgaattctggattctgttaatatctgactggcagacgattcgaccttgtggccgtggatactactatagcgaaagtgtaaaaaaaagcaaacaaatcggaacatgatgcaataccgtccattccataggacaaacggggttccgggtctgaataatgtatgaaaaaaatagacacatccttgaagcaaagagccaaggacagaagaatagtattaaacaacctaaagccatgcacaggtaaagaatcataccgccaacgaagagagaaaaaggcgggcccgtgcaaggcatgcaataagaatgtatatcgacaaggtaacaatacaagtattgaaggggcattagggcgtaggtcgactgaggagaatagagaatcgatagatgccgaagtcatagtgggcgtgagcagtcatcggatatctggtcaggaccagaagctaagaggcaaaagaaggaattacttcctcttgctcatcaccttggtaatcgcatgtcgaatgattgttcccgccttttcaatctctttcttggtgagaccggtagtgacgcacaccttcagggctgccgggacaacctgtttgggctcgaagttgtcctcaagggtcttcagtcgcgtgattagaacaccgttggcgagagactgcgagaaaattagaaatggactcaaagagggttataatgggagacagtgtatagtaagtacctcatcgactgcatcttgtagcaagaactgctggtcgtctggtgtaagccgcttagcagccacaacctccggcttgatgaccaggatcaggataggattctcaggcgcgctggtgcagtaaacccagtcactacgaggatccaactgagcacgcatggcctttgtgagttcccgaagttgtgacactgtctcagggttgttctgaaggatgttgatagtggcactggcggtagtcgagagcagagcgggaagcgcagcggagaaggtatacgcagcggccgaaatacgctggtggtgaacaatctcctctgaaccagcacagaagccgccaccagcaactaggggaccagccagtgaccccacaatcatatcaacttcggcagcatcgacgttctggtgctccgtgataccacggccagtgcgtcccaaaacaccgaaggaccaggtttcatcaaggatcagacggaacttgtacttgagtctgagttcgatctgcgacagttgtaagcacgggtaaaatgattggtaaaatgacttaagttaacggggtcacatacgatcttgggcaagtccgccatgtcaccgtaagactcaaataaaccctccgtaataataaatctgcgagtcaggggtttccgggcttgctccttggtgaccttcgcgagcacccgctccagatcctccatgtcattatgctcataccaccggacaatgcttcgagagatctgaatacccttgcgaattgcaaagctaacccccttatctgcgacgatgatatctccacgcttcgagaaggcaggaataacactggaaattgtggagaaggcttgggagtacataatgcaagccgcggtccctatgaatgcggccacatcatcttctgtcttcatgtgaacatcctgtgtgccgtagaaaccacggggtccgcagggaccgactccataagcgcggagtgtctggattgcctgttccttgagggactcattcgtattgaagttgtaaaaattgaaggagccaaggttcgtaacggtgcggccgttggccagtttcgatttggggcctactggactgcagatccaatttcatctgtcagtaaaatgtccgctgagtacgccaggctgaagcgatgggaaggattggggtacaatacccgactatgacggtgcgtttatcaacttccatctcctccaacgtcgtcgggctcccgacgaggggctctggggtccattcgtccacaaggtcatcaatctcatcttccgtgagtggtacgacgcccggtttagtcgaatacttgggcgctagtagatatcgcacggcgaaaaggaagaggaaaagttcaacggcagaacgaattgggtcatcttggtagcttgatttcacgtagcggaggaggattgcggaaccaggcacacggtgaaatagatccgcgagttcatgcaggtatatggaaaggatacgctgggtctcctggagatccatagcggacggttggaaaacgcgcgagttgtgggtgcgccaggccagcgagataccagaaacgcaataggtcaaagagagacgcgagagataggtgtgtatgatggagggaagatgaaacggggggctcggagccctgggaacctccgtgtcacgtgacatatccgttcggccacaggcattgcaggttcttgggagattgtagattgaatttagggactacaacttgagtattgtcaaagaggatttctcgaaagcaatgcaatttaattccggtagaagtgtaaaataaaacaagcaaagaaagctggaaaaacgaaggtaaacccccgaggatgacttggaagactccttcatacaagtgtcattccacaaacaatatttggaagcaaccatccattaagatcaaattgtgcgcccgtgagttcagaaaaatgcagcgaattttagtaaacgcataactttgtacaaagcattccgatgtcgtttcgccgaagcgattagatggaccacacgccggtgccctccgaggctgccgggatgctgcccgaggagtagcccttcgggatgttagatccggtgtaccaggagacggtatcattgagtccgcgatccagtggctgcaggaggccaactgcgttggtcttggatacaccgaggctcttccacaggtcgcccttcaggacgctatccaattgccccgtgttccgcatgacgacaggcgcagcgataataacgacgaagatgacaagcatgacaaagtagagaatggcgaagcggacaacgcgtctcttgcgaagtttggactgcttgagagaatagatgggagggcgaatttgagagctagaagcatctctcgttagtacagatgttgaaaccagggtaaagagatacgtaccttgggcgcagccaaaacaggatgaccgaatggaaggtgtcgacataggggatggcaagggccgggagcatggcgaacaggagaatgtggccaaggaagaagtcattggcgaaataaccgagttcggtgatcttgcacaggaattcacgtccgggctgagaaagagagtgccaacccatgttgtaccattttcctgtccaccaagcaatattggattgatcgttcttgaattcacgagtcaatgcgagagaaatgatcaccttgtagatgaatcgctggagagccatggcagcgatcatgcctgagatggtacgggcccaactgagggattcaaggaagaacatagccaggaagataatcaggaatacaatcacggcgatagcatgggcgatagcggcgaggacagcaccgaacttcttgcagcacatgctgaacactgggcccatacagcaagccataccgaagaacatgcccgcgacaccggcattgataccgacgggagcgaaagcgacgatcgcaatacggaggatggggttcgcggcccatttgacatcatcggaatacatggttcgggagttgatgtagaggtatggaatcagtgtcacagcaacgccgagcaagggcgcaatgatttcgctgaagaagatgttggtgatgcgcgctctggggacatcaccagagcctttttccgagggaacaccaagaagtttccgcttgtaaccagtgatgcgagtacgcgaaaggcgacagaagccgatccaagaggaagcatgggaccgggagttaccgcgagaaagccagcggatatagtcgcggtaatcgataaaaaagtcgttccatgcaaactggtgtgggttgaacaggaaaggcgaaatgcacagcgcgagtagagacacccagaaccaaatcagagcgggagtccaaaccgttgtggtactgaacaacagcatcaacagaaggcgagcacccaagtaaattgaaggcccagcgaatcgtgagtaaaggacaccgaatgggatacgagccgttgcgaaaccacggccggtaccaatgtatcgcgcacctccgaaagacaagttctggtgcacggcgttggcgtagatctgacaaacgaacacttcgaacatgaacgagaacgaaccgaagtgcttggccagacgagtagccatacgccacactcctctctctgtcaactcttggacggcaagagggacgaacgagatgaagaacacgatgaaaatggagataacacagcggtccacccagttaagaactgggatcagattggcacaaagagtgggcacaagaggatcggtaataggcaagtcggagttgtaacggcacatgatggtttcatgcttcagggcgccgaggttgatcaggacgaccatgaacatttgcacagaaagcatgatgaacatgttgttcaaatggaaaccagggtgagcatagtagaacgagaggaagcgatcgaggggcagctgggtaccgagatagtagtactctcgggacagcatctgttcgcccataccagtaccaatcttggtggtgaagttgagaatggatccgaaaccgagatcacgacccttaccacactgataatattcacaatgcttaatgcgacctccacggaggacggcattcataccagcgtaaatatcctcgttcaggtgcaatcccttctgggctttggagacaccaccacgggtggtcatgaaagtggcgttcaagaaatcagggtgaccgtagtgcagcttaccaccgatttgagcaagtgtacgagcgaagagtgtaccgaacgtttgttccttggaggcggcaacatcacccaggacaccgacgctctcggagaaaatgtattcacgggctcccaggatagcaacgggggtttcctcgggcgaagcgattccgggggtgtacggagaaacattgtcggtggtcaactcctcgaactcggcgaggacactgcgaatcttcaagcattcttcaaggtagttgtcttggttggcatcgatgagctggatatattcaccacggtagaagatgattgcatggttctggttgtcagactttccatctccgagaatagggtttccagaaagctgaattctgaacttgggcttccgcatgttgttctcaagaagttcacagtgaccatcgatcaaggccgagtacagacggggttcttcgccttcgttgacgggtggctcctcatccaggtatgcaatctgcaggtcggggtaagcgcggagcaggaattcggtgttctcacgttcgtccttgctgaacttggcatagcgctgcatggagacacagatgcggaacttgcggcgagccatacgctcgagctcgcgctcaagcttctcggagttaccaccaaacatctggacaacctcggggttctcgacacggtaaagaagcttgatagcacggctgtagttcatgaaaccagacacagtcctgtacaaggtctgagatcgcagggaagcccagattctggtgcgcagagtatattcaggagcggcggacttaaaaccgatgcagtagaaaggaagatcatcaaccttgctcttggcaacgtctttctcgggcttttcgtaatcaccgttgaactgcgaggtctcatcggccagaatcttggtgtccttgacgaagcaatcccactcgtgggggtgcagctgcttgaggtattccagcagagtcacacgggagtacggctcatcttcacggataatctcacggagagagagaagaatcttttcactgtagtggggaatcaagacagtgaaggtgggcatgttgtcaacggggagaggctcgggcatgggtgtagagagcgattgggcaaagaacgagatgcggcgctctgcctcgcttccctgagggaagaactcagtcttgaaagactgatcttcctgtgagacgaagaaggtcggggcccggagggtacgctttccttcctgctcggagggaacctggtgatacaacagcttctgcacatggtcgatagccagcagatgctcacggtacatggaaatgatgatagcgttccaaacctgtgagatcaaaaccttcggcttgtatttgatctccatgtcggtagtggcgagcacctttgagtagatacgcttcggaagtcgtgagaagatgttcctccacggtgaccaaattgacacacccaggtagaaggatcgggccacggagaagattgtgttgcaaataatgtaccacaggtaactatccaggaagaagagtgtcaagtccataaaggccatcaagcccagcagaatctgaggctgtcggtggcaaagtttgttgccgatgtattgcgcgccggtacactgatggatctgcattggagacaagatgcggatgggatccttgaaagatagcgtcaggaagaagtaggattccgccaacttggcaccaaacacacagacccataggccatatgacatccacatgtcgttaccttgaagacgagggaaactagctgtgaatgtttggctggcaacgtattgccgaccacctttcttcatgtagttgccgaatagcgcgcccagtggctggattgcgaagaaagcagctgtcaggacggcaataacgaagtggacaataccgagagccaggccaatgccatcttcggttttctttgccattcccagcatgggcaagatactgaatatcacgataccaggagccaggttgatgatgaacatgaggaggaggaacataaagcgctttcgaaggtgctgcgctccagcccatcgtcgaggaacgtacatccactcaaaaatggtggctagaatctggatgaaggaaacaagagcaccaccgaaaccaaccgcggcgagatatttaggcgtgggtggcttgttgtcaacctgctgctggtagttgatggtatacagggttggggcgttgtaagcagtgaagaaccagaaggaacccaggtggataacccagatacggttgaagttggtgatcatatggaaccaggagcgcgtttccttgtaagtcttgaagaaggccttgtcccactgtacgtccttcaacttgggccatctctcggcgatgggaacatcgaccagacgagtcttatcctcgaaccctatccgctcaataccctccgggtaccagaacagctggttcatatcatcataaccaatgattttgttgtgatcatgctcacgacgaacgtacttgccgtccatgatttcatatccctggtctcgacagtactggtatagaggagtaatgatctcattcagataggtgaattcctccaccggttcaacgcgggcctgacattccggcgaggtatagtaatcgtcggcacacttgaagatgaaacagatgcactctggcaggaatcggacctggttggcttcaccccagatcaaaagatacagagcaatttgacgggcccgatcatgctgagacatgcggttcatgcgagatttccaccggtactcggcagcttccaaactgttgtctccttccaaggcctcgagtgtttcctcttcgttctcgggattctgtttggcggccttggctgcagccttgcgggctttccgggtcttgcgatcagccttaccgagcttcatgttggcgaaaccgaccgcatcgtcaagatcgagatgggcggcgaaataccagcggcggtaattagcgttgtggccaccgatgtagtcggcatggatggagagaagtgcctggttcggcgtcatacgcgaggcacgagagtccagcatggtcatcatgtggtcatacatgtttcgcatgctatctcgttggaagccaaacttattgaccaaatccaggaagatatcctcaatctcctccttcgagagagggatctgggcgtctgaggtccaggcagggtaaggctcgcgcgaacgctggcccgcgggaagagcgttgccgtagtccattccgtatacaggagtggaagcgccagatgatcggttggctccgtaggagatttgggaggaaggaggacggtagccaccacgaccgccgtactggctgtccgagtagctattgtagcgttcgtccccacggccgtagtagtccatgtccgcagcccgagcagtctcggacctcattgtgaaatcgctgaaggtctctgagtcctcctcggaatcgtggccacgacggcctcggggttccccgtgtccctggtcgtagtactgatcgccggcgccgtagtaatggtcttggtgtccggcctcgtaatatcctccgtcggcgtatccgtggcctgcatccccatgggggtccccgtgaccaccgtctgctccgtagtagccattactattgttcccgtcagcccttccattactcaaccttctctctggccaagagtggtcatacccttgatcataatagccatcaccatatccttggttgtcgtaataaccctgggcatgttcgtcctgatagtaggagtcaccatgaccatgatgtgcttgcccctgctggccatagccatcgtcatagtggcctccgcctgcatagcccgacatgacgagcgaatcgcgatcaatttggtgctaagagctctgccggagggaggattagctctagatgtccaagactcagatgatggcattcgcctcaaaccagtctcacctcaatcgtgaccattcaaagtattatttttgttcgggatgtcgaattaatgcagcatggacgtagaaagatgaaagcaagatgcgcagggaaagaaatgcgttaacttgagtacccaagtgaaggtgtcgaacgagtctcagactccgtaacgaatggcaggtgagggtttccctgtctcacgaaaaggaaggtgcaatgggaatattttaagagcaaaagcaacctccctcctatccttctttcgtcgaaaagaaagaacacgaaagggtagcaagtagaaggaaagatggagacaaaaagcgaatggaagggggttggagagggaagacaagaaaatgcttgttatttttgggattcgggggggtcgctgtgttgactccagagtaatttaccgtcatcttacacctataaagggtacgtgtcagacttccaagtactggatacctcttcccagtacggttagcccctatctttcccaggtactgattaccacccctttgtttaccatacgtggcgcattaagttttacacagttgactttccctctctctgtctgtctctctctctcaaccttgtattcttcaaacgcctgtccaagatgtctctgatcgtccattttggaattaccgttattgtccgactgtatttacgcttgtgtttcccccgatcactttcaacttctccccccaatctccccctttttccatccaatgatagtctcccacggacactcggaatccaagggagtctcgacggcccctgaaacttgccccaccgtaaccagccagcatgtaatcaggtaacaaataatgtggccgggggctattttcagagataccgggctatggaactggctgctgcagtgatgggtgttgattcgacggtcttgttatggcgaccaacttggtatgtagggatggcgttgcaccagcactgattttcattccccgtactgtgtacggagtacggagtacggatatacatttctagacatggccctcacacttcctaaatgtgtgatggtactgacctgtatcgacccatgagaaaccatattataatttgaaacctaatgatagtttacattccctctacggagttgatattcttaaccgtgatttgatgctcgaataaaattaatatttgagctcagatctgtggacgcttggtccagttcctgtaccatggctctcaagcgaccaagaaccacttgggcatccgtggacgtctctgctttcccactaccatgttcttgatatatttttttatatattattgtgcttcaatctccacgatcttcaatccttattgctcctttcatcgtagtcttgaatcgatcgcaaactttttttactctggtttagtgttttagcggctgatttgccaccgcaatacaagtgtctcaaatctagtcgatcagttccatacagctgtatggattacattgggctttccactcctcttctcactgtggctggcaagccctccatacatgtacggagtacactgtacagcgtagtgggtgctattgcacagtggacacccgtaccacgagaaaacatggaattgcggtcctatttacggagtcgacttgttgggtctttcacagccacaggcggaactcgctagtcacggatgtaaataacgtttgaaaactcaatcgtcagttgtctaaatttatctttatagtactccgtatctctccaatgtcaagttaagatggtttatccagacctcaacctcgcacaattatccattcttataggcatcattaattacaccgtatcaactgggatcattaataattcaagacaacctgacctgtcgtatccgaatacatgtacactagctgatactgtatatgtatacagagctagtaactttgtattcgaaaaagatccccacccgttagacgcaggatttcaagtggatcaccgattgcgtttttcttaattctttcggagcctcgaccaagagacctgcttacaatattgtacgcagtactctgtcactccgtagcgaggtcagtgcagcactatcaaaatggtgcttatcgggtatgctgtggcaccttgtagcggttacaatatatacttgcatatcggactgcagcattattagtttgcaatagagtacggatacttgtaccttgtactccgtataccatcatactggcggatgcaggattgcgcaggaacgatacatcagctgcatgaaggaaaccgatcttcgacatctgatcttcgtttcctgtaaatttccgtctatccgccttcctgcggcctttactataggcactattatcagttacaggctggcatcccaagagctcggtagccatcattcaattatacaaattgcagtacgccaaaaataacctgtcgacggagaagattggtcttaaagggcctagtcagcgatcactagccggcaggcgtgccctagtgtcgcacatttattgtaccgagttcggcattgctgtgtattgatccgccacctttaatacttcgtacacttctccgtacactagcgaacagtcgtgaaatgtggctgaacattaggcaaatggtcataattatttatgaagacagcgttcgggagtacccttactatctattttaaatggcttagttgcatataggggagccggtggcgtcgatggctgggattggtgtttctagaaccccatacaagctcttctatgattatttttggctctagcccctgaatagggcgttttacattcaatgtcagcaccggctccctgcggaaggatttcaacctagagctcaccatttattaagataggagaccttgggctctaattcaaattacgaattaagtacctactccgtacggagtactctgagtacataatcagggggctgtgacccccggggccgccccctccaccgtctatcagcattatggtcgggagccaatcacaacccctgttgttgaggtcgtagttgtgtcaatatacaagacactgaaagggcccgagtggtgatatgccgatattattacaagaatttatatttggaaaggcttgccgcaccacatgatcgtacatagtaaatctacgtattatccgcccatttcacatataccacacgcattctccctccctggcagagattgcatatgtagtacgatgttatatctttatgacaagtttagtaagccccaattatcgcccaaatatgtcttactttatctcaatgtgctacctagtagtattccgtatagtgtatatcccctcatttagttaccctttgcatggaaagctctctctatatcaactacgtttttcgtcttcctatattagagtcacaccattcgcatcaggcttctgttgaagctattttgcacctaaataattatcgagccgggaatcttaactagtgatgtcaagccgatctacaaatgcagggacgaatgacataacctctcgcgcaatcgcagattctatcgggctctctggtctacaatatatagaacccagatcagattccggatttttgcaacgagtaaaacaggcaatctccactatttgctgggaagcaaggggacacggatcttcatcggcataacgacggatggccctgatcaacgtccctctatcaagtatcggtccgagctccagaggcccaacctccactacagccacgcggtacaatgtagcttctccatctgggatcagcgtacttcggaagttcgtccattccgagtgaggctgtgcggctccctcgccaggaacattacctgcagcaaggagttccggccgaacggcgtttgagcaccacgcgcctatgcgctatcctcacattggacagctctggcctttgtgtgttatttgtgctggttatgataggacgtctaggacgtcatagagctgcagttggctttgtgtctctttttctatatcccgtctgagccaaaaggtgttatttacgatttatggctttcctaatatcattgttagtgctcatttttggctaaatatttgatttttcacctacctgggatctttattgggactttatatgtacaaaagggtagttgatgcttattcgtctattatggtgttgaatattacctagatatattctattaaatgttcaagattagacccctgggccttcccataattaaccttagcattggcagaccttattatgctttagatatggatgggcagaatacatatttttatactaccttgattctataactacgaagtgtagcttcatcccattgcacgtttaagttatagctgctgttcctagcttcataatacaagcatatatagaagtcttcacaatttaataggccaatagtttgtgttattttattagttgttagatttttgtcgtcgatatatatatatgccgcggcagttgcaaccgatatataaccacaacactattggtattttttcttcttatttacatggcaatgaatccattgatttggaaaaagcagcactcccaaacaagtgaaggttatcataagcataatatcaagttgaaatcaacttattgagcaactgaatatcccttgtcttgtggtagccaccacaattgcacagacatcgtggcaacgcatttgtgttgacatacatgggatatcttatgtctttgtctctgtgcagactgagcccttttgccagtttgcctagtttgccattctctttgcttattgaggcttcatatacagcctcctttccatagatccattaccacgcctttcttcttcccgattttccccatctctatgacatggagttcgttcacttccgtccgatgaaaaccgggaagtcgttttatgatattgccgcagttttgtttgcaaccaactacaataggcctggcgtcaataaaaatagaatgtgggaagcaatggaagagaacagaattggtggaatttaatttcgatccgcctcgtacacaaatcaagtgcttataagaggagatttcactagtggaattatataactagatatcaccggaccaaacaatgtcatacggtatgttcgatgtggattttcaccgctacactttgcagtgtgaacgcaactagtctgtgcgtatgcgcttgcccgactcaaggtctgttatttaaagcaggcgttccccctcgcaatctctcattctatatgtgattcaagactatttctacatcaaattcgattcaaatttgccaaaattcaaaattccctctttccgcgatgcattactatgatatggcagaaacttgggagttcagcgacggcccgaagcttctgtacacgcaggtcatcttccaggatggggataagtacttttcagctcagctgcctgaacaaatcgcttgcccagacgacatcccgcctaccaccaaaagccgtcttaaagagatccctgtcgaacacatttggcctccgctagaagatggtcttttgatatgccacgatgctgagaagccaggtgtctatattaaacagccccggctcactggctatgatggttcggagtcgttgagcctgtatctacttcaggaagctcgtatctgccagatcctgatgcaaaacgaacaccagaatattgctcgttaccttggatgtgtggtgaaaggcgggcggattaccggactttgtttccagagatatgtggagacgcttgctgacagccttaacgctggacgttctttcaacataaaaagctgtctccagcagatccaggcgggcattgatcacctccatactctcaatttaatccataatgacctccacctgggaaacatcatggttacaaacgaagacgctgacacatttgcgatcatcgattttgactcatgtgctatcaagggacatccgctcccagacaagcgaggtaaaatgcctgaaggtgcctgtaccgcagaaattgaaaacgacgatctcgggtttaagatgctccaggaagaacttcatcaggggatagctagtactagagggcttggttagggggcgagcgcatttttcaagaagagcaatagtgttattgatgcgcttccttttagtagcttatagagcgatatatagacttttgggaagtgagcctaagcctgagcacccttataaaagcggcagatcaaataggaaaggctcacacgagagggaaaatccggtatgtctagtggtatatatatcattgaaccaatgcaccaatttccgtgcggtagacctacaacactcccagatagtaaatgacccaaacgttcctaacctgatcatctgagcagccctggagacctgtcggcttgcagcttaacctggcggcccctcccaacgccgggaggtccacaggcaggactgccatgatgatatttattttgtcacattcagtgctggctcatgatataaaaaaagacgaacgttttacaactacagcctagattacaaacctacagtcatatatatattgacctgtgattgaggtggcacatatagttgtgggttgctcacgttgccgtgccaacgcatccgttgacagctcaacagccagagcaacatgggaccaaccttcaaagaacaacgaaaatcccggggcctccagcaccgacctggtcagcgcaaacacagtgctttatttaatccaggggaaagttttcgccatcaccaccagcgcccataggatatcattgctgttagaacaacgcgatcatggcaaagctcaacacagccaacccgctcgtcaaaaacacacctcacaaagagccggtcgcacgcaccgtagggatgtcccacaacagcccactgtgcagagagtcacatttcaatttcagaaacacagcgaagcaaaatatgcctaccaagccgcaaaagcagtcgcgacggcaagcaaatggctcaagcggatcatttgatatattccctgacagcgattcgggatcggaaagtgaatctggacagcacaggtccaccggaaaacaacaaaggcaaagaacactaggactcgcacgtgcgaactcgttactcctaccgacaaagcggagaccacgcccagccatccggagggagactgaagattatgacaaggagaacgatgtaccagaatatgccatggacggatatcaaactccggatctaacaccgacaaggccgaatgcctcacagatccccacacgaagtaggatggatcatatcgcctcgacacagctagagattgaccggcaagaagaacaagaggggaattatgtcagctttgaagaagatagctctgactcactagacgggttcatcgtcagtgacaatgacgagcctagcttctttgacacatcggattctgagacagccgatacagaagacgaacctagcccggctccatcgcctgccaggtcaccaaggaaaagactcatacgtggaaggaggccaatatcagaagcagaatcaaacaccactgcagatgaggagccagcaatggaagtgacgaagctgtcgccagagctggaccgagcaattgagaaatcaaaggcagtcgacccagtacctgaagactgcgcgccaaatcttgcaaccagttccaaatctagatcccctgtccgcaaggcagaagtacccaagtcacaacctcttcatttcggcctccacaactccaacgacctcatccaacaccttgaggatcttgaactaggcagcgacgacgagcctacgtcgcaaacacagccagaacagccccagtaagtttcttaaatgggcattcatgtgcattcataggctcgtagcagcaatcatactaactacttctcacagctcagaatcagaagatgaactaccatcagacccctacacaagccacacaaacttaccaccagtgacaccgtcgcgcgcgaagcctcacttttttctcaatccctctatcacatctgttgaagactcaccaggcatggggattcctaccactataaaggcccagaaaaaggccgaagcagcgcggaaacgcgagattcgagcgcaactggccgaattcaaccaaaagaagatcggctttgccgaagagttcctccgacaccttgacaatgccttcaatgaccagattagtcgcatgaccgaggcaaccggcggaatcaaaatcgtctggacaaagaactttagaaacaccgccggccgcgcaaccgtgcgttcagagcggttcctgaaaggagcagttgaagaacccgggaaacggcgttactatgccaccattgagctctccgagaaagtcctggacaccgaagacaagatcctctgtacggtgacacacgaatactgccacctcctcgatatcatggtcactgaaaacagggccaagggtacggctcagcacggtgccagcttcaagcaatggggcgcccgatgcgttcgtgcactggaaggtcaccctatctacgggggtcgggtcgaggtcacgactaagcatacctacgagatcaaccacaaatacatctgggcctgcaaggtgcagggttgtggtttcaaggtcgggcgacactcaaagagtattgacccaaatcgtcagttctgcgggcgttgtaggggcagcctcgagcagatcaagccggtgccgagggctgtggcgccgaagaggcctgttgttaaggctatggttgaggagaaggagaaggagattgtggtcattgatccttgatatttaattaactggtcatgtaaatattcgagtatgaccagtggggttaccaatgagcccaatataatgaacacatgaatgtctacctacgtcaattgacttttctgggatagtagattcaagtagcccgagacgtggcaatataaccactagcatgaaataaccaacaagattgaaacaacttggaactgtttgatcccactggtctagagtcatttcaaatcaattgcgatatttattaatccgtcctgtatccagcacgctggcaagtagggaaaagcacctacaataaattcttcacggtcgttactgcatttggtttaacctccaccggtggcataaagcttacattgtcgaccaataagatcgagtgatgtttgtcctctttgggtttagtctccgcaaagcttccgaatagttacctacttattaagatgttggatgcgatatggcgagccacaattttggaggctataaatgggattgttcctgcttggaaaaagccatagaaatactcaatcttctttgtcatattcttactcttcaaaccagccctcacaatggcttttggatacaagaaagtcctgatcatcggtgccacctccgggattggcagaacactcgccgacaaagtcgtccaaaatggatcgaacctaattgtcaccggtcgcagaaaggaaaagctcgatgagatcgtccagaaatatggcagcgacaaggtctctgcaaagacatttgatgtcatgcagctcgagcaggtaaggtcacccatgtcaagcgaggtatgtccccaactaacgtgtccaatgaaaataaagatcccacaatttgcctcagatatcgtctccgagaaccccgatctggactgcatctttgtcaactcgggtatccagcgacccttcgatttctccaagccggaaaccgtcgatctggacatcttcgaccaagaactgatcacgaactatacatccgcggtccgcatagccaaagcattcctcccacacttgcagagccagaagactgcagcagccatcgcattcacgacgtcgcaaatggctctcgtgcccatgatgcgatgcccgaattatggcgcttccaaggctgctctgcaccatttcatccttgccctccgcactcagctgcagggtggtcctggggatgtaaaggttttggagatttatcctccggctgtgcagactgagcttcatgatgctaagcatcagcctgatttgaaggatggtcatttgattgggatgccgttgcaggaatttgttgatgaggtttggggtcgaatttcagacggcgaggatcaaattgctgtcgggtctgcgatggatatttacaatgcgttcgagacgaagaggcaggagttgtatcgggatatgacagagttgctttctgggttactgaagcagtttttgaggtaggatctgagctttcagatgttagatgcatataaatgttagattttatggatatggaactcacatcatgttatcttcattctcatccgtcgatataagagtgcacagggggaaacggaatcgaggaaacagcttgccctttacaagccgccagtatcaatccactaaaacaagaaacatcatggacacgacctgcaaccaatccatccgaccactcgtgcaatgaaaccatagaatcaccagagccggtgagcgcatcttgccacgctctctccgaattctcatcccacaggttggttcgtaaatcaaacggcaaagagtctataaacggtgtccgcactgaatagttcctcgtattcaacgagtaagcactgcgcaacatgaagcagacaataatagtccgccggacactctcagcaagaagccaagcatatcgaggactgaaggttcccggaagttgaataggcgcttgttgccacagtttcacagcgactctcgccagcataacactgatcgcctctgaatacggacatatattgccgtcttcgcgcagaaccaacatacattgattcaacaccaaagcttgactgcatcccagtagctcttcgaatgtcgcagcgtgacttagtctgcgacagaggtccgctgagttttgccggagcattgataacagagtaacgcttacgcgaccggtttggtgggtttgcatatgaagtctgcaaatattgtggatctcacgaataggggttggcaggcccttcgtataaaggtcaggatgaatgaaaagtgtcttcctcttttctgcgaatttgacaggtaaattccgcaagccgacaacgaggaatcggacgatatttggatcatattctttcgcgatttccagccgtaggggcgtttgtatttgtggcgttggagtcatgttggcaattgagcgcttagggcccacataccggccagcagatggccttcgagtagattgtacagtgagaggtgcattcacatatccacagttgatgtctttgcccagacacctactgcatctgggccagccttggtcacatcgccgcttggctttgatacaggcttggcatgatctctgtaatgtcactggatttgagcgatcaggcggcatgggctgctgggctacacgaggctgaagatgtaatcaattcagactgcaattcagttgaaatctacagggtaggcatcaatggagcagagaggagagagttgtatcgggagagaagtggagcaagctcttggctagtttgcctaggtaggtagttaactactgagggtgacaaattccgacctgggcagccctggaggtcttattggccccggggcccaccgtccaccttagtaataacactgcgtcgctacctactttaccagttaaggctagccaacctacgtacaacatagttaggtagccctggagggataacaccatgtcgtcttcgactataaccaatggcagggataaaatatagcaagaaacagatactttggtaatgcaatggctgctagcaaccgagcaagtactaactaaactagttaagcgtagtctgtgtactaagtgagcatatgtactgcaatatgctcgtattcgactaagcgattgtccagatctgcaattagggctaccgtttttggagttggaaataatgacgataccaccactgcatcgggagccaaccccaactaagaaccacttgccggcctccaaaaaaaaaaataaaaagaaagaaaagactactggatccacctcccctcaatatagccagctgataggaaaatccaataggtaagcggttttatgcgcgaataattgacctcactgcaatgaaacggcacattgccagccatgcatcgtaccaatgccggcattagccccaaaggatttctgctgtctaccaattaggagggttgcccaggtgttcaggttagggtccatccatgctgaattcggatgtgactccggagtacggagtatgcggctgttgagaacatacccacatgggtaacccccatcaatttctacttgcgacccgacccgtcttatcctgcagatatacgtgtcaacccttgctccttcgattggtcctggtacttaggggttcatgtcgagctgagtattcacgagaacctagatatcttctttcatcttgctttctatgtgctctaaatattcatctagtgcgcagagcaagacaaaaatgtcatacttcacagacaagacggacaattacccaaatctgagtcattctttcagatcaatgagaccagaatatgatgttgtgattataggatctggctatggtgctggagtagcagcaagtcgaatggcgcgggcagggaagagcgtcgcagtgctagagcttggctgggaaagaagatgtacggattgagagacttcaagtaaaataccattgctaacacttctatagccggttcatttccgcataccttctctcaatgtgtgaaagacatgagcatctcggggagtactgcgaagaactccttcatctctaagtggctaaagtgcctgtctggggaccccacgcggctttttcaagtatttttgggtgatggacaacactcgtttgctgctcatggtaggtgaagcccaacatatcccggaatccatgaataagaaaaccaacagctttttggtcggaatcataggacttggaggatcttcattgatcaacgctggagttttcctgaaagcggatgaaggcacactgcatatgagtccatggccgtccgaaatcagggatgagccatctatactcgacgaatgtgagttatatatatatgcacatgacagaggacattccataacctagaaccaatgcagactactcacgcgccgaaacaatgctgcaaccttccacatatccggagaattcaaccccgagtaaacttgagcatctttcaaaagagtcgagatggcttggggagaaagggaatttttatcgagtacccttgaccatatttttccacaatggccgcaacagtgcaggtgtccctatgcaggcaaatagacaatcaggccatgagtgcactggtctcaacgacggttcgaaaaactcggtggcaacaacttatcttgcagatgcctggaattggggagctgagatattctgcggatgtgaagttcaatttgtagaaaagactgatggaggaggctacactatatacttcgcctggcatggaagtgggaggtcggtgttcacggatcatttcaaggaacagctcttttgggtcaaagcagtaagtgaattcatccttcagaggtggatgtgtcagctcaccctgtctacttcaatcacagaaggaattctgtttccttggggctggtgctttaggaactactggggttttgcttcggtcaaagcagcacggcctccatatgtcaccgctcgttggaaggaatctatctggaaatggtgaccttttaatatttggtacgtacgtcgccaggaaacaaaaccgagcacatttgattgacacattcaaggttacaatggagacgccaatatcaatgggatcgcccgtgaatattcccgtgctccccctggaacaaccgtcactgctgttattgataggcgagttgttgatcccctgaaaaatcccctatctggatatgttattcaagatggttgtattcccgagacgttcaaccctgtaatccaaatcatgctcaccctgcagaccatcaagagccaggcgctatgctgtctttggaaccctcgccaagaagccaggaagacccttgcctctcttaagtctctcctgttcggtccatatgcacacaatggagctcttcagcgcacttcaacttatcttgtgatgtctcatgacagcaatgagataacattgaccttgaaggatgatcaattgtgcttgcggggaccggcagagggacgatctgagcatttcaaatggataaagaagatgttcaaggagctttttgctcgcacaggagcaaggatagggttttcatatccttatggtaaggattgataaaagccaccgcaaagctacgctaaccatagtcaaaggtcgtcaccaggaggaagtcacagtccatctccttggaggagctaacatgagcaacgatggaacagggcatgggggtgtaacaaatcatcgaggggaggtcttcagtgggcctaacgatgaagtacacaaaggcctcgtctgttgtgatgcatctgtcatcccgacggccctaggtatgtctaaagggaagactttctagcttcctatatgctgattctgacaggcgtgaacccgttggccacgatatctgccctttccgagcggtccgtcagtttgatcgctgagaggtctggattgtcaattgatctcgaaactgaaaaccagcccttgaacgcctacagcaagcctagtgtatcatgggattgtcaaccccatcagaacagtaccaaggaagcgccccagtccataggatggcaatttacagagatcatgcatggtcacatccgcatcggatcagagattggaagttttgcagtttccgaaagggtaggaaagggtgcgtcctgctcgatgcggatgtttcttacagtcgaaatctgccgacgaggaggtaagaaaccgagagacccctttagcagtagaatgcttacagtacagatttacaataccaaggaacatgcaccgggacgatttcttgctacgcattatccaaagccactctcaagattgtcgacgggactgttgactttttcacgccaatacaagagaatgccgaatcatcagctatttcataccacctgaagctcctctcggtagagggcatggagtaccgcctggaaggtcacaagctcatcgactcgaagatagcattctctgccagaaagacctgggaagcgacaaccacggtgaacgttaatatcactcgaccagatgggacgaatgtcggagcaggggcccttcacatctcattgctagacttcaaaaagcagatgagaacgttccggaacacacgagacttccagataagtcttatcttggccttgatgggctttttgatttcttttatgtaccatatcagtctcttcttctttcgccctttcgtccctatgcgcttccctccgatctcaagggaacccagtgacccgcaacaaccaccttccacctcgtgcaacatcactgcaagcgatggtgtacaagttcaccttgctatacatgacccaattcctatacaaaagacaggcgatccagcacccaactccaacctttcaccagtcctgcttttacccggagtcaccgggatcggcgcgatgcataatttgtactcgctcccattcttgcgctgcaacatggttgagtatttttcgcagcgtggacaccgatgctacgcactcactcctcgttggggctgtgatcccgccgttgcgcagaaaagcactgtctacgactgccgtcttgacgttgctgctgcaataggatacattcgcggcaaagagcgacagaaaccctatgtaatagcccattgccaaggctcagtggctctctgcatgggactgctggacggaacaatccagagtaaccaccttcttggtgttactgccaactccgtcttcatgaaccaggtctttgggtattggaactctcttaaagggagaacgactctgctgatccagttttacgaattattggctggggactacttccccattgtcaacagtgctaagagcgttcttttccaacgattgcttgacgtcctcctccgtttctatcccgttgggcacgcccgtgatctttgcacgtctacagcgtgtcaccggacatcttttgcttttggattgctgtggaatcataagaaccttgatatgggtcttcatgaaaatgttcatcaattttttgcgggggcccatacaaagtttatgaagcaagtggtttgcatgggaactcgggggatctgcaccgataatggtttatgtcctcttctgacagctaagaatttgcaacggctgcaagggttaccgattctctttgtgtcgggtacggagaatcaagtgttcaaccccgagtctacccttaaggactatgagttattacgacgacgatttggcgagagactttatcgcaggtttctagtcgaggggtacggacatcttgatcctattgtagggaaggatgcggccgatgatgtatattggagaatcttcggccatttgagatggtgcaccaaagagatggaaaatgaaatgggagagggacaataacatccaagttgaggggatacacattgcatgcaggggactacaccgccgggactatacagggattatgaggggctcaggctattccgtttgggaattaaatgttctcctataagccactcaaagccttgcctacaataaaaatctgttcatatagctctccaacatggtccaattctgcgaggattgcggtcatcttctcccagtatcgtcagcagaacagattccatgtgaactctgtgggaaatccacgaagagtgagtgatacaaatacaaccaaccttgaaacattttcggaatttctctttcactgacgctttatgaccctcagatacaatacttactgatgtccaaatatcttcatcaaccaatttcccttccagacttcggaccaaactactttccaagacccaggttgtctcacaaaaggatcttggcgacggtcctataacagacatggaatgtccccagtgctcgaattccaaagctacttggactgaggctcagcttcggagcgccgacgaagggagtactatcttttactgttgcacaaaatgcagacacaggtatgctgcatccaaaatgccccagccccttgctcaccgacttttctgatatttggatttagatggcaagaaaataattgaatggtgcccttataccattgcagaagtgatcagctacaaggcgaagctatatccatgttgtataccaagctcatagcgctgttctggggccaagtgatgaagtctatctaaagtggatcaattcaatctgcttctaaaagaaacccccagccaatgaaattgacgaatctatactcgtgtgtgggcccccaatcattcaccttcgcttggataacctcactggcctggacagtcgggaggcgaataaaatcgacccacatatgatccggttcctgaattgaaaaaatggaaaattcgaggacgtaaagaaacaacatacccaaagcaccatgtctcttgtatatatcaccacagaaccatcagaccggattcacgtaaaaggaatcacccaaacgcaacccgattggatccacccacaactaatcgagagcaccgacgcgatcaaaggccgccaatttcgcgtttccggtcccatccccaaaggcacctgtctcctcgtcgacaccccctacgcagttatccccgtcgttgacgaacccgcccacaacgacaatctcatctgcagcaatcccgcttgtaatcggcccgcacctcgccacacccggactccatgtccgaatgcctgtatcccggatgtgacgtggtgcggcagcacatgtcgcgacgccgatagtcttcgacatgagtttgaatgcgcttggctcaaacggtatgcggggactattcggtccaaatggagtgaatatgatttcggcatgttgtgggtgatccttcgattgcttgctgcgcgccattgtcaattgcaggaacggacggctgttggtgttgccgagtcgacggggtgctggaagcatggatggagtgggatcgaatcgctctgtggttctgaggatacttggccccatgataaagtccggtcttggtctgttcttgtgaagaagtatctgaggagtagccctgctcttcctcatgggatgagtgcagatcgtgttcttcatctcatttgtcaggaagaggcaaattcatttggtctttatccacgggaaacaggccacttcccactgccgaaggatcctgtcgatagaggagagcaattcgccgctgctgtttatcccactgcggcaatagctaatcattcatgtctgccaaacgtaagtggaattgttcgccgtcgaatctgaggaagtactaattcaccaccaggtcatccataaagccgatgacaagggccgaatggtgtttaccgcctcccgtgacattttcccgggcgaggaatgctgcatctcatacttcgacctgacacaatatacggatcttgcttcgcgtcgcgagcatcttcggaaatcgttccgttttgtgtgccagtgtgaacgatgtgtttccgaagagcccaacgaatcagcagaatggactgcaatgccaatgatggatgtatgagagtcgccgactataaaatgaactagatctatagaaactagatagaacactataccacaatattacctttgatttatgaatagactaaaacacacctgtgtagtcctttaaacacggcaagtcaaatgtttatttctatctactcatctcaaagcgcaaatggctcttgtcccatatcccaagccagctattacagccgcgtcctcccaataaaatcccaatcccaatgcacatctgccatccaaatccatacatctaaacaaagagaccccaatcacaaacctgcaatctcccaaccaaagccccaatggtctcctcagcaaccacctcctcaagcgacaaacccctaggatccccattcttatcaaactcctcatgaggcacattaaagaagaccaacaaatccgtctcctgcgcctcaagtctaacaagcaagaaatgacacgtcaacctcgagacctgcggcaaaccactagaaaccccattcatctgggcacccaaaaccccagaatccgaaacaccagcagcggacccatcaccagagacagggacacgaccgccgccgccacgcgcgggggtcgtgaaggagacaacgccgcgatacgccttgatagtggcaggagaaggcgaggaagaagcaagctggacttcgacgcgcgcaggcgacttgatcacctgcatggtgtcaccttcgtcgcagagatcgtgcaggtggtacagggcagcggcttggtcgactgtttctgtcgttgcggatgctgcgctgccgctgcccggggcggtggttggctgctggtggtcgagcgcggcgaaggtggatagagcttctgcttgcgggacgcgctggttgatttcgatgattaggttggagagtgtggttggtgagagccagagctcttggtggtcggggacctcgcggagagtactggggttgggtgttagttgggttctttttgattgggatgttttgggattggataagattggattggaggaataaaatgggaaattcatgcatgggggagttgtatactaacctcgaatcaatccagccttgtggcacgacgcctcgaatggctccgccgaagaactcttgctctgtgaattgaggcatgttggagttggtatgtcttaattgtaagacggaggattttggtcttcttcttttcttttcttttcctttttcaaaggatgttctgctggttgtgcaggagcaatccaaattcttcgagataagttgcggattttttcgccggtcccttttgtttttgttcgaggtccgacaatacaatggaagacaagcaatactagagaggagcacagattaacagggactatataattccagaatggagaaacctttaggtagacgagcagacgtgcatgaggcaacaattgcgggcgggtgttttccgcccaatgacgtttggcggtttggcggggtgttgactcaatatacgagctacatttaagcgactatcaactcacggattcattgaaatggcaaagcgaatcaccatttgagagcaaggtctttaggaaccaccacgacaaccgggttacaatctttagtatagaagaatagtttagctgcttttacagcttcattatgtctctctcagttgtcttttatagatctacataaaagtaactaacctatgcccgggtacatcactacctatgtaggtattttctgcagagccaaccttggaaactctaggggttcttgttacagacactgtagggctacctttctcctacaacgtttgatctatgtaatgaatgggaacttgtttcactagagtatctgatgaattcgaagagcaggtccgttcaccgataaaaaaaaaaactcaattgatatcgttaactcatgatgaggcttgagtgcagggctgcccaaatttacttatggaatgacaacggcaatgatcacttctggggagaccagaggccgggagcacccttgaccttgtcaccgctggagatatggttggaatatggctttttggctccaagaatagagtgacttacatggagccggtggcaccgccgtggccgtggttgtcactggcacgctgggtcttgtcgaaggcctcctggccaacacccttgctatcatcggtcttcaagccgcgggtagtgcggtcagtggtatcagtggcagtctccttgaccttgtcctgggtggacttggtggagtcaggagtgagtttctccttggcctctgtagaaagagtcgtcagtcacaatgccttaacatcttgacaggcaggtatggcagtgtcacatactggtggtaaaacccttgcgaccggcgtcagacataatgaagattggttaaagtttggtagttcaaagtagatgtaactcttggaattgtatggtttggttgaagtaagagatgttggatgaaggaagaaaagccagctaaggaggcaaagaggggggtttatataggtttgtttggcctcattgcgtgctcataaagagacataacatgaagttgttggttgtttgctttcgtgaccgacttgcgcaatacaaaccagacacagctaggcaatgtgtatacagatctatttgggccgggggcccggactaaccacaacctccaatctgaataaatggttcctccaatgagcatagttcctaaggctcagctgttcgtgatattccacgatgtacaagctgtggcacgcgatatgctcttgattcgttcaattcgattttctggagatgacatcatgaagatcttccaggtagcagagagctccaggcttgcgggttagaaatcacatgattatttcttatcgcagtttccaagtttggctatcacgtgaaattaataatccaggggcaactaggcctaattgggaatagacaataacaggcggtcaaggactatttgacagaactactcaccgccttcgtcacccccctcgggcatcaactgtagtcgttcatctccgaccaacttgtttgctttcattctcatccgttctctttgactcactatgtggataagatctgttcttctccatgcatcattgtctcattctccctgattaccatcctgatcgttatcttggtgacaacactttgaattatcgttcttccatttgctaccatccaaacgccaaacgcacgaacctgttacacacccgttacatctctctcatctagcggtcaatgacactgtcagatcctcctgtcccttcaaattgggactttgctcccgtgcatcacctactatgttcgcctatcgagggctgcactgcgagacctagtcgccacaatgaatctacaatcacctcgcttggtgaacaacaagccgagggtgatccccgttacaccactaatggcagactcataagtctccagcggagtaacccaaaacttggtgacttcggttctctttgggagcttttccatggggcccctgctcctgcaagcgtctcacccactttggggactacaaggaccgccaagtctgagctggagaaggttcagccattacttgaagaactgctgcctagttcagcggaaagacctaccagaaaggtctcattctctggcatcccctgcatcgaagattctgtccccatttcatctgacgcatctcacgccatcaatgagccagatactcgggtcctcaaggacaccaccactggctatacctcccattattcttctcgcccgaaagcacatgtgacaggtatccctgtcgattttgagggacgatcattcactatcttgaaacggggttctgttcatgagcctttaggaacgactgccaatgtgacatttggtattccaccgacccctccggagactattactagagccctagctggtgatccaagtgatactcccacggcgagacccaagtctcgttctcgcggaaaagatttccggaagaacacgcgcgataacccagtcacttccgaagaaagtgctgggctggactcggacaccagcattgttttcgatcaccccgttcgtgagaaacctgtggcaattccatttgtcccatttcaagtcggcagatttgaaacgaagacacgccattatgataccccaccgtcctcatttgacgataatgaatggatactgaatactgataccatccgaggatttgcttctggaggtactcctgtgcggtctctccttcaccaatccgccgcggaacgaagagtcaccttgatgagtagactcctcggtcattttcctgattacgccaaagtcgtgtctcaagtgggacagcctttacaccatcgtcccaaagagagtactacctcacgtcctattcatgtatttgttgacgtgtcaaatgtatgctttagtcccccacttacccaatatctgtcaagctaatttgcctcagatcatggtcgggttccacgattcggtgaaaacctcgagaaatatccctctctcagcccgaattcgtcgtgtccacatgtccttcgcgaacctcgcattgattatggaacgcggccgccaaaccgccaagagagtcttggtcggatcagatcgtcttccctgcgtcgatgaagctgagagactcggctacgaagtgaatattcttgagcgtgtgcagaaggtgaaggcgatcacaccccgtcgcaacaacaagtcacggaagaatactgtctccaattaccagggtggatatagcggtcctgaaacggtcgccggctctggagagcgatgggttgagcagggtgtggacgaaattctacacctgaagatcctggagagccttctggatacggaacgcccggcgacgattgttttggcgacgggggatgcggcagtagctgagttctccggcggtttcatgaagatggtcgagcgcgggctacagcgcggctggaatgttgagcttgtcagcttttctcagggcactagttacgcgtaccggaagaaagagttccgaactcgatggagagaccagttcaagctagttgagcttgaccggtacttggaggaactgtttgagtgaatgccctcactggagattcaccttttgccatttcaatcaatgaaatcaagacttatcttttcagctatttggatgcgctaagcatctttacagtccttattgcctatcgggaagctaaatgaaccactcacattaggccttctaaacgctaaatgatatacagagctggcttttctaccgctcgcctatactgccattgaatctcgttgtcgcttaagttgaccaagctcgcgctctagctctttatacttcgcccgtgcccctggtgtatccttgggaagatcatggaacgccctcacgcggccttgcaaggctttgaccgtctcccgcatcttgataacattctcctcctccgctatcagttcctcaatagtcgggccccggggttggactttttcaagtgacgcgatgcgatcttggtactccccgaccttgattgcaagtgtcttcgtgccgcgtgtccattccgacgtcaagctttgtgtttcggacggtgtctcatacgccacatcggtcttcaattcctcaagctccgtctgtagccgtgctagctctcgctgaaggtatcgatgcaacgtgtcgacctttccaatttgttcctgggcctcgaactcctccaccgtgagctccacaatcgactgccccagatcccccgggttcggatttaaagtattgcccagagcggcggctgagtcggcgaggtcctctagatcacgtctccctgtatcatccaaacacatctcgacttcatcaaggagttgattcttctgttgttcgtgggggtctttgcgttcgaactcttcccgtagtttgtatgcctcaacagcttcttcgcgcgcgcaatgttgtagagtggcttcttcatctgcggcatcattggctgcagctagtgtcaggaggacgcggagggtatcttcgttgcgctcgaacttggggaccggtttgggcgcgtattgtcgattgagccaggagttgacgtacgcccaatctttagcttggatagcagcctggcgggctttagctggcgaaaggagtggactatccatgagaatatgtaccgatgcaactccagaaatgaattcagacaaatcaggaggggaaaataaatggccttgaagagtaatgtgttgacgataagatacggccaaggcggtcgatgcgccacgccaagtgtgaggttgtcctctacttcccctcgccgactttctgggctgctcgaacaacaatgaccagctacttcccaccaggtggcagcgccagtaatggcgcgagtacgcagaccgcatcgtctccgttgtccccgccaacgcagcgcccgaccgcgctcaccaatcggttgacaacggtgctgtcggcatcgtatgcggactcggacattcgggactctctcgagactttgagcttgagaggcattcacaacactgaagagacacgtcgacaactacgactggatgtacaaaaggaagttgtcgattgcaatgcggagattgtcaaggactttgggaaagtggccgaggtgagactcctattgctcctttagagatagggctccggaactctaattactgaatggcgattgcagcaattgagacggatcggaacggttgtctctacgctcaatcagacatgcgaagatatgcgcaaacgaatcaacctcgcgaagcaggacaccacgccggtactcgaggaggctagcgctctgatggcacagaagaaagagaccgagaccaaacaacagctgttggaagccttttcgaaacatttcttagttccggaagaggatttactggtcttgacgtcggccgaggagcctgttgacgagcggttcttcgacgtgttagctcgtgttaagcaagtgcaccacgattgcgaagtcttgctcggcggcgagaatcagcgactaggcttggaggtgatggaattgagcacccggaatctcaattcagcataccagaaactgtaccgatggatccagaaagaattcagatccctgaatctagaggaccctcgcatcagtagtacgatccgccgcgctctacgggtgctggcagaacgcccgagtctattccacagttgcttggatttctttgcggaggcacgggactatgtgctgtctgatgctttccactatgcattgaccgacgctgtttccggggcgaatgggcccggcaccagtgatcacaccgtcaaaccgattgagttctcggcgcatgacccgctccggtacatcggtgatatgcttgcctgggtgcactcgacaactgtatcagaacgagaggctctggagtcgttgtttgttgatgacggggacgaactcgctcgggggattcaggccggcctgaatagcgagccctggtcgcgcatcgatgaggatcaagaagttgcctttgatggccaaaaggcactcagtgacttagtcaaccgcgatcttacgggggtgtctcgatccctgcggcagagagtagagctcgtcattcagagtcatgaggaccccgttacttgctacaaggtggtgaacttgctgtctttctaccgtacgaccttcaccaaactagtgggcgcgcaatcgcacttggtcgacctgatccagaacttggagaagtccactcttggccactttgagactttgatgcgcgaccaaatcagcgccttggcgggcgacaatattgccctgactccaccagacgacctgtcacccccacagttcttgctagatgcgttggaaggcctagaactactgatgaagacctatgagacttccgtcggaccagaagattcattacccgacgcgaacgagaacccgttcacttctgtcctccgagccgccttcgatccattcttgacgctggcccggtcctcatccgacgaactccaaaccaccacagcgcagtccatctaccgcacaaatatactccttgcagctcgcgcagctgtgtcaccattccccttcgccagctgcacacacgtccctcccatttctgcagccctatcaactctccgcagcgatctcctcgacacccaacaccaattcctcctcgagacctctggtctccaaaagctcttagatgccctagaacctttctcagagaccgccgaagacaagaccgagaagccagaccagaaaccccatctagccgacctggccagtctcccagctttccaaccagagtccttgattacatccagccaacaactcgacgacttcctcccatctgcgcttatggacgcaaccgataatctgaaacgcgtgcaaagcctctcccttattcagagcgtcactgaggatgcagttgaggcattctgccgtgatttcgagttcgtcgaaggcatgatcattgccgccgacgaggcgcgaggaactgtgaatgtggccattggaacaggggacagtgttagcggccggagtggtaaatccgatggcaagacagaagccagcgagaaggataaagaagaggccgaagagggcgaggatgaacaatggagtttgagatcgttgttccctcgaacgacgggggagatccgagtgttgttgagttaatctatatatcccctatacaggttgtacttgatctatatcgaaatgtacaatgaaaacatgcagctgcacagccccggaaatcaatgggtgcgctagaagcgctcagttgagaacatgttaggactcagatatagcattcgagttaacaggaagaggaatatgccaaatacatgtagacaataaacaagaattgctattgcattcctataaccgtatcgaacatacaaagtccccacagacgagggggaatagagacaagagagcagaaccaaaaagtccaagatgagtgaatcaaaatctactctatccacctcgctcaccaaattccctcgcccaatcttcatatttccggagcccatcggaggaaacactaggccgaatggaatacaaacttgactcgaagtcctggaatataatggcgcggatctggtccataggcgtgtgtagaagggcctcacccagattacgcagggggcccatggccgcatctttagcgagggctgttatgtctgaaccggagaagcctagggttcttagttaggaatacgaaccagacaaaaataaaaaataaaagaaataaaaaaggcgggtatacgcgtgagggaagaacataccttctgtcacctgtaccagaacctggatatccgcatcactcagctcgtgatgctgatgactgagaagtctgcgtatctgctgctcgcggacatggtgttcgggcaaggggatgtactggcgacggacgaagcggcgacgtgcagcctcatcgatatcccaaggcatattggtagccgctaagacgaggacgcgactagcgtcgccttccttcttctcgcggcttgtttgttcgcggcctgcagctgcgcgctggaggtcagaccattgaactaggaattcagtcttggagcgacgtgaggcttcatgctctgagccggatgatcgggcggagaggagggagtcgatttcgtcgacgaagatgatggatggagcgagggctttggcgagcccgaagagagcgcgtacgagcttctcgctttcgccgtgccatttggaggttagacttgatgcggagatggagaagaaggttgattttgattctgtggctactgctcgtgcgagcatggttttgcctgtgcctggcgggccgaagaggagcattccgcgagctggttcgcggaggccagagaagaggtctggacggaggaatgggtagacgactgcttctttgagagcctttttggctgcttctaagcctgctatgtcatcccagtgtacttcgtcaccgcgcaccacgatgtcgttcagaatttgcttcgctgactggggatccacgcccctaggcaatttttccattattttcacgatttcactgtcatcttcctcgtcttcgtcctctgcgtcgcttgctgtggtccgctgatctgaagactcttggtcgcttgacaatggcgtctcctgctgtttgactggtgtggctttgcgccgtactgcactatcgttattcccttgagaaatagccagccggtcgagaccacgatggaaatcatcaccactagcgggtgatggggaaacgcgggccgtttcaccaattatgggcggtctaggcgcagagtttgtccgcggtttatcgtgggaagaattcttttcacggtcaagccgaggcgtcagactccgagaagtactctcggacttggtggcttgcattggatggcttgttggttgatgggaggatcgcaaggccacaggcttgggtttgatggatggtctaggtggtgcaaaatcagccgggttcggcatagacattgcatgaggattttgttgtttagggctgtcaggtggaggtcgaggcacccgcggcggcagctgactaggcgactgggcagatggtctgggagaggacctttttggagatgaacgaggaggctctcgccaatgggcagcaggaattcggtctccggataggtggtcttgggaagagcgaattctcggccgcggaggctcatccccagaactgggtcttggttctggatctcggcggaaattggggtcgtgggcggcgctttgccgagatgatgcgagagccgcttcgctcacaggcttctcgcccgatgcagagcgatagatgctaccccatgctagacccgcagccgtagaagcagcaggcctcgattccttcttctttgatgcaaccttgactttcttgccattctttttgccatcgctgctgcgcagagttgtcaacattggtttccggcgctcgggactggaaccacgcgacttggttttgcccgaagaatttgagctcacccgcaatgcaggcgaaccagccgctgacagggcggctgtcccagcatcatcgtaaactggcggcgactcatgactttgttttgtcggcagcgcagggcggttgggtatggcggctggtttggaaaggtcggtgtatcccacagcagggattgttccatctccgatccagcccggggggttggaagacgatggcggtatgctgggggtagacttgcccttgacgagggtagcggcctgtttactgccatttgcctctgcggattctttcctgctttcttggagagcgcctagtagatcgacccgttctcggcattgaatctctagcgcccggatggaatcctgcagggctctttcggtttcggatttcggggtatagttcgacggtacacgacgggcattgtggtggtagatagtctcaagggcagatctccaggacctcaatgcttcctcctcgttgttctaatataatgagcctcagggaactggtgtcgaattagtggactcacctgcccctcaaagtacactgcagtggagcacgcgagatagcactcgtcgtacgtcttctgcagggaagacgcaggccgtgggcgcatcatttggaatatacaggcccgcctgtatccatttcacgacaggttggtggagttggtgaaagcgatgatctcccgcaggtggagggggggaggatttttcgcgtgacgtagtcgattcggagtcgattcggagttttgtactgcatgcgtccattgaactacatacatacataactaggtagtagcatctttatacaaatcaattgaaatggtaaaacccagatatcatctctaaattcctcacgtctatgggtacatgcaagatactaaaaaaagagaacataagttatagtgatgccacaagagaacccagccctctcaagaaaccaaaaataaaagaaccagaggggtttccaacgccggtcacagtgtaggacacatcgaatggaagagagcatcgaagaatcccaagataagaaaaataagaaaataagcaccaggtttaatctccgaagtcgaaagtggccgtgtcccgcttttcccaaaactatacattgccgaaatgcttttatgaaaagccctaaacatgcaaagaagatcgaaatccaggctctgctggcccaagatgcgccatgatgagggttgctgggctccgcccaacccccaaaatccagaacatattgtaaaagaacagacccatatcgcccgaagagatcaaagaaagattatatggtgcccacacaaacgtggtatatcgaacaagtagcaggtccatcgggaatggtggatgggacccatggcgagcggccgtgggaaaggttcaagtcggggttcgtttagtcgaggtgcttcttgaagtaagccttagccatctcgtaggatgtcctagaagaaaaaaaaaagtcagtaaatgtccaatcaagtacggagagaaaccgaatcttagaatgagacgtaccagcaaattgcagtgctcggcatagtggaaataatccgagggcgcatgccacgcaggaagccagaccagccaaactggcgcttgatgatggcagcagcgttgaacagaccccttgcggaccgcacctcctcgctctctgccaggccacgggtctgaaggagcgtctttacgacgtcaaggggagtggtaataccagctgcgaaggcaccggccagaccacctgcgatgcagtgggtgaacgggtcgtactcattcttggggttcatgaccttcgagatggactcgtaggcaacgaattgagtggccgtgaagggcacggtcatgcaaagtgtggtagggtaggagacgtagaaggcctggataccttcggtgcggtagagggtcttggcgcattgcgccagggtcttgtgaactgagccgtggacctgcatacgctgcttcatgactggaaaaggagttagcggggcgcgatttattgcctcgcatgggtcacttaccatcgaatgggttcatcagcgcatcgctggcaatggtggcggccgctccactcatagctgcacgataatcacgttagtacacaaaataaaaatcaattcaacagatccgaaaatcttaccggcagccaaggggtggtgtccatcgtcgacattaccgccagccatttccttcacaatctcatatgtaccgaagtagacagcgtgggcgggacctatcgtcgcgaatcaggattgagtcttcaactcaggaccttccacgatatacacacctgcaccgacaataacactcgagactcccttccatagtgtccgccagccctcaacccgatagattgtagagaccgcgttggtcaatccggtgtagagaccgccagttgaaggggtcaggatttgcatgcgagtctagcgacgcccaaaatagtcagcgctcaatcttttcctagttcgaatgccatcaacccaaaaatcaagcttaccttgagcaagtcaacagggtacatcactgagtgttccttttatccggtcagccaaagatcctcatcaacacccctaacaacgatgtagacataccgctatccccgcaaaagcaccagccagcatattccggccaaggccatagttggacggaagggcttcatagctagaacaggttgcatcacattagcttaggccacacaattggattccgcagagcgacaacagggcggaacaagtcaggatgctcaacagggacaatcaatcaatgcctgaaacaggtcatatctccagaaaataagatgtgtttgtccctgtgttcattccagcgatcccgatgcccgactgccgggggaagaaaaaaatccatcggagagcgacatactcgaattcctgtccggggatctgatcgggagccgccatggagcttccgctagctcaaggcgcagctgtagcagatgaatagttcgtgcggagagggagggaggtggttgacagtggcggaggtggaggaatggaaaagtgaagatgagataaacggggattggggttggagatcccgaggaacacagacacaatgccaacgagagagtaaaaagaacagaaagccaacaaaaaggggggatgaatgaaatgaagaatagaggaatagaagaagagtgttccttctttcttcttttttttttttcctttttaacggagtatctggggaggaaatcctgaaatattggaaatttaggtgttttgggctcaggaaaacggcgctagggaaattattcacggactttgcccagcttttattatgttatgattttacactattaactcttcaatgttcttatttctgttgggccattagagactatcttctacttatcctctctatcttccttattctccttacttcaatccctttagaaatactctggagaatcccccgtgcttattcagaatcggcggccagaccccggaactaactgaacataatagttaactaattacctacaatgctacaatgtaggtaattatatgtatcagtatccaaaaaaaggccgacataactgtacggagtattccgtccagctccggagaacacatgcctattaacactgactaccaagacatccaaggtaaaatatctccggaacttccgatgacggagtttacccttaactttttatgtaaagtaccatattggtacctccacagtgaaataaccacggtacaggtacacggctggtacttctgattttatcaatcagataagacggcccccctaataagccatgtacgcccttgaccacatttcgcctaactcatattaagtggagctttgggcttcttcggcttcgagaagggggctttttttattctattaaagtacctataaccatctctttatacatacatacacaggtgtacatcatgatatttcatgtccattccaaggttgttaactaagatttagatctcgtttcaacctaggagacgaagcagaaaacagaacacgcgatttttgaccggggcatgccgagccccggtgggactgcaagccgcgaactaaactcatctggtctgcatatattggctcggtttcggctgagtgaccccctgtttcccatggaaaacccttacacttcatagtcaagggatcgaacgtggtggatatcgattgggctgccagtccgtagagtcactctatagtatataggagcgtacatgggcagagtcctcattctccttccactcgctacatgtgtgcattgaatgggagaatttctctgatatctgcctgttataaaagctctggaaacaatcatttctgtaagggaaaaaaaagccgatgcgcctgaactcgaggcaatgaggaaagagaagacggagtctgtgatggaaaaaagaacacaccaaaagaaaagccctcgtcaaatgaggatacatgcagaattcgaagtatttcgaggacgccccgaacacaaaactaggacgatttcagtcctggagatggatggatattaccgttgttgctgcgaaaacagtgcaagggtcacgatctcaatgcctaacgggtcaagggtggaggaggaaaagggaaacaggtatgctggaacttcttgtaaaaaaaattgtcgttcacgtcgtcaagatctcgtccgtaactagtctacggcgagcggagggttaaagttgtggtttaccactcaacgttaaacgaccactctcctagagaatacgggttagcaatgtagtgagatcacagatcagattcccacttaccattcttcaagttctcggcagtgtcactcaatagaatcacccggcgcttgttgcaataagcagtcttgtccaggatatcgactttgagttctgccaactcggcaactggcttctcgaacatctcactgagactctcaacggccatctccaaatccttctggttatcctcaaatatctcagtcaggttgttgcgagcaaggtaaaatgcaaacgcataagtccacttcaaggtctgacggcattgctggagggcctgcgacgcggtatccaggaactgcacctcaatccaggacagaccagactgcgactgaagactagtcatcttcttctcggtcttcaggtacaaatccttgtcgagcttggcagactgctcatggttcgcataccgattatagtaatgcaggtagcgctccagggaggaacgcgatttggcttgcgcacttcgggcgtctgcgcctgacttttcttcgtagcggttgcagttgtaccagctcgtgccatgctcggaccagaggcccatacacatccagcagaactcgtacttgcatttgcggcaagtcatgtggttacagccgccgttcttctcgatcgtcgagttacacttagtacactctttggtgtttgccgagatccagttggccgtctcggagtcatcttcacatttctgtagccacatcttgaccagcttgcatggagcgggctggtggtcgttgagggaacagccgaagcagaactcgtgtttacagaaacatcgcacagttggaacaatgcgacggagatcacggttctttaccccacagtcaatggcgtattgacagtttggtgctggacaccattttaggttttctttatcgtcgacgtaggtccgggttaaaagttcgcgatacctgttagtgagacacgttagcggattctaaattatcagctaaaaacagccgccataatgagacaccccaccttccttgaagctcctttgtcacgagcaaatccagcgacttgtagtccacgatgcgattacagccatcgcctggacactggatccgggcagcctctccttcctctttaattttctgccccaggtagtgtcgatagcagtcgacacaaaatcggtgaccacaacgcatggcatacgtctcgaggtcatcaccatcctcgcagcagatatcacacatgaagcccgggacgcgctcagtctttgcggtcccctcgaagttcgacccaaggccagcctcctccagcgtctcctccggatgctccatataagattcaatcaatttttctttcttccaccgtccgaaccgcaacaagatcgccaccgactcaggcgggagcccgaggacggcgcaaacctcgttgacctggccaacctgttcacgctcgatatctggagggtcgagaaccttgaactcaacttcgtacggcttctttttatgcttgatgaggtctttatcgtccgaaaatccggcgtcgaggtcatcgaagtctgcttcccaaggcacagcttgttagtcactcatactcaagacatagcacacacggaaataataagaccaagtaaagcaaatatcagacgcccacgtaccttcccccaagctctcatcctcagagccctgggtacccaagaaatcatcttggctcgagacgtcgctcatgaaatcatcgtcagagtccatgctggcggtcgtgggcgtcgcggagagcctcttttttgggccggaactgacgggactttctctctctggggtttctgttgcagttgttgactcgcttttgtgggagtgccggtcggacgcagagggtttccgggagccgggggcggcgtttggctcgtccgcaatcgcctcagccgcctttctctttcgcgttatcggaggcgtggtgaaggtaacggcaaagatgccgggtgttataggtggtgagatccagacgtcactgggtaaaacctgtgacgggcacggatagaggggagtggggaagtgaaagatctccctccgaaggcggctcgaaccggtgttcgaaggaattacgatttgggttgagatattgaaatctctacaattctattgaaatatgaaactgaaatagaacacggacaaaaaaaaataatagtcatttcaaggtttctacctaggtaggttggtcagctgactcagatatgaatcattccacttgttgactttgcactcgttttgtctctgtaggttgccgtggactatgttttcaaaggagataccttcgtcctttcctaacatacctttattattaccctctctatattctaatatctaatatcctttatcgacgtcgctatacccccgcctaccctctttatccgagtactacctatatcgatcttttgaagaacgagagaagtgtactataatgacccaatactactaccatataaggggatagaaaagtaaagcgagtgtattctataaagagtaggatctacttggctatttaacctatattaggattataaagtagtgctaatagctaggcgagtgttacctaaggctagtaagtaatacctaaggtggctactaactatataactagagaaagtaaaagactaaataaatatataggaagggagtaattccggctaatatacccccctaggagccacctataggctctatagaagttaaagtctttattttgcttcgctccgctcagcaaataatacaggcaatatacccaacagacataatggagggaaatgatggagggaaataatgtgagggaaataatggagagttagagaatggatgacacaatataagggtacgcgcatttcacatgacactaatttcaggagcaccttaacacttatcattcgacaacattcgacttgaacatatttttgacttaacatttctacaaccagcttcaaaccttactataggcttctctatttacccaaattccctaagcaaagcatggaggaaggggatacttggacaactctatttttcgatgggagctgtccagatattctgaggaagaacgagcttgacggtaaaagcttccgaccttttcgtcctagagacgaaaattggaaactaggacgttgggtcgacaccttaagagaaccgaatgcgaacactatacaggtgttttggcttccgatcgaaggacgcgaagaattgataggcaaagtcgtgagtggagacgatacctatacgcgtgctacgaattaactataaactagtttcctaagtattctacggaagatgccgaggcctaacttagttatattagagtattaccgactccgggtaggatagacgaagctatatacgagttcgatagattttatcgggaggctcgagcatatagctatattgacctattctgttccccccgcgaaagggtctatttcccaaaattccatagggtggtcactaatatgctaacctatcgattctcctctaggtattggcataagcgagcggttgtgctagaggcaataagaccgaacttatgctctcggcgtgtccttaatgaagatatcaatcacctgtctaaggactgcttaaaggaccttgaaaagctatctatagagctttaaacgactcccgaagtgatctcgctaagttcattcgagtaggcgtagtatcattctttactgaacgaccgacttcgtcgcctagatgctttgtatcgaattgggataacccatactgatatccatgattttcactttcgacttcctaatgacatttacgatacggttctatacgacttctccgaatcgtacacgttctctaagaagcagccttttcgggtgaattccggaaagccgaggtctttacgtagtatatctgcgggtgaacgcggccgtgtccttctaggcatccagaatcggtaagaaagaagacttcatcccttatatcatgactaacgcaccccccagaggcatatcacgagatctttgttcctatttgaccagatcgaaaccagaatcttgtgttgataacgcactctggcagtctctcgttaaagaggtggaattgttagagttaatcatgctcaaaatctcctgtcgcccagatggtctgttattgttgatctatatagaagtccctagcgaagcatcgttctatacgctatacgattactgcactgtcaagtatctaaagcaagttggcgtagatgttaagcacgcggatctaggcacggagggcattcatagcaacgggcatatgttctttatggagaagaaccctaaaattgcagaccgggtgtacaagtggctgaaaaagcactaatcaacgggaagaacgtccatgtgttgtattgaggaaggaacccgtggaataaaagctgtgacttccagcgaaaagaacttcctcttgtcaacaacacacatttcttgctggcatcacacgtcgcctgctaccagcctcttcttcttcttctttttttctataaaaaaaaaccaacgccttcggaatggcggactctgaacgcccccgtgtaagtgttgacaccactgccatgcctttgtttccccaagcctcccaatccccagtgcaatgagacttctaccatgaccatcatactcccaacgattatcacatattcattgttcatagattgttggaacatgcactaacaaatgataggctttttgttactattgcaacatgccagatcacacagaagctgattgccgccggttgagggcgctgggtgccctcaaccgcatgtccctccccccggccaccgtaagatccacatgcctacttttggggaaacgttattgatttgagatgtgactgctgcagaccaagcgcaaggctcaccgcgcctttcgaggcggcaaagcaaagaagggtatgtcatgctgttgtcaatgatacctttcccaaaagttcactctcacttcactctcacttcactctcacttcactctcacttcactctcacttcactctcacttcactctcacttcactctcacttctttctcgcttctttctcgcttcgtccttttttacattgctctgttgccctgttgccctgttgctcacaggcgagtggctaacatatcaacagccaagaccgccgcaaaggagggtacgtgtttgccctaaacaattctacggactaagcgaacacaatgctgacatatcttgtgtgcttagcagccgcctccaacagcactgctctccccagcccggccccccgctcccctcatggcccccagtctccccactccccccgctcccgccgggcctctcccgttcctcctacctcccccccagggcctccccgccctctaatgaggcacaagcctctggcgtagttggtaagttgattctgatacagactgtcgaggtcaatgttgtcctcgtgggatcaggctctaatgaatgttgattaggacgtgcccctacccccgccaccaccaccatcggtaagcacaattccagcacgctcttattttccccagcattatactctgtcctgctgtgttgctgtgtgtgctgcgtttgctgcgtttcctggagttgttgcgttttcctgctacgcggaagtgtcgctgtgttctgtgttattgagcggatgtgctaacgattgatcagtggacggcgagaagaagaacaacgagaagaagaacaacgagaagaagaacaacgagaagaagaacaacgagaagaagaagtcttttttacctttttctttttctttttttctttaccagagtccgggctccggcccaaatacaatcaacagaccagcgtgactggttgccctgcggggcactttcaacaacacttttgctgtatagagtagatgtgtgttacattcatgctcatgatcctatcttagcattgatctgagctattatgaatacgcccgcccttttatagccctttatagacagttgatgagtccttctagtcaggcttgagcaccggtgctctcgacgttgggaattatcctctcttatgggctcccaaggttgacctttgctgaataggtagctccggataaagcaaagtaccagttacctatcaggaagtcccgaattaggcgtagtgtgcttgagcccaaaagtccacgggtttgatccaaagattataaatagtacgcgtatgtatgacacccatgtagttatataaactttggagtccaggcacctactcacaggtcgtctgccgtctatcacttccttttttcttcatccttttcaggctggcgcaatttttctttccctacttctttcaatcatctcgatatggccgagacacaagctcagtcccatgcctttctcaggtccctcattcaacaagccaaagaccttgagcctgacttcccttctcctgatgacttccagagacttggagttcaagtagtccaagtccccctggccccggaaaatgaccaaggtctccaatttgaaccctgcttctttcgaccgcatcccgataaactgtttcagaaacatccaatccatcctttggacttggagaatgatccacagaacatacaatatagcgaaacgttgaaggattacatagaggatgccctgacggagcattcccctgaaaacgctccaataattgcgagaatggaatacgaaatgtcgttgggctttccgccagagcgcgatccatacatacaagccaaggatgtagaggatatgattggctctcacatccgggcgggaagatacggaccgcatgaatggttcacacttggagacatcctagacaatgagcagaaatgttgggagtaagtaaacggtcaagcgttgaatgctaaagtataaaactaacaatttgtaggccgcaccagagagaaaatgaccctcttacttacgagggagttgaagatccaaagccgtggcaagtggtcaatcataaccgatacaccagtcgccccttgaagccgcattcaattatgtcatgtctcgctcaactctggcctgatgcaagccagggtctcagtacccacgagctaagagccatcgtgaacacgatgcttcttcgagtgaatcacaacccattccgcaaatgccatattcatccagtaagtgatttttcacatattatatgataatttctaagatttgtacagattttggttctctcttttatgggcgattatcagggaagaatcattcaagcttcgtatgatggaaagggactgattctacaatactcgcaactctggagctttgcggacattaaaaaggcaccagtggaattgttcgttcgatatcgtttaagtcagacagttggtggtatccgcactttgtcttagatagctatttagtatgttcttcatatcagccctcacaatttgctttcctatattccccttgtcatacctcacatatttgcaaatgtagtagtgcttgccatgtagatatgtaaacattgggctttgcgggaaggagcgtgtacacttctaactcgacaaatttaggtataatcttccaaatctctcagacctctagaactagggctagtggaggtccactccattcccgggccggcccccgggggggccagtttgactgcttattaagcatgagtaagttccaacctgcccacctgatcatttgtaggctttaaagcctacagtgccacacccccttgcttgtataacagtgtaaaagctccatgaattcatactatgaaatctattatggtgtataccacccatagctctcaatagtagcctccatccggtgcggtatcgtctcagagagatgcctcatatgatccagatttaaaccatgccatgcctgctgcgcagtttcgactaaaataccctttggcatatcattattcctgatataaataagatcaggccgaagcttatagatagatgagctcccactagcgcgaaattatggcggtgtagatagtataggaaggcggtacatatgtggggcaaaaggggtgttagatcttttgctgtgtcactgtatgtaggaaatacctacctaggtaggtacacacctgagaacattggaaatcagtcacctgggcactaactactaagtctatttaggaaatgggtcacgaaccttggaaccttggaaccttagaatgttgtagggttcgaaactcgaggtttatgcctaagtgcccgaatctggcctaaaatgagaatctgaacaagaggtagccacggtctcttgggttaacgtattatcgagagataccctgagcatgcccacctgggcacctgcctaggtggatacctaaatgtatgcgcatgtaggtattgtaccgtaggtccatatgtatgcatctacatatgtagtatatctgactctaataagagcttagtattctgaaatacataaatacgctctacaacgttgtatatccatcccagtatgaaaataaggaaattcgaaagacatttggaattttaataaaagaaaatgtggtatctactcctcatcactttcctcggattcttcttcggattcttcctcgctactctcctcctctgcctcggcaagccaatcaacaaattgctgggtttggctgcggacagtccgcatttcctcggagttactagagcgctcatcattccaccactggtcgtaagcctcctcctcaatcaggtcaagttcatatagagacttggcagtaaagagaaggaccatatcacccttgttgcgatggataagatcgttctgtaggcagagcagtagatcaacctggtctttcttctcttccttgttgcgatcgaatagagtgcgctcaacaacctccttgtatgccgtgaaaacctcactgaccgctggaccggcacccttgccgccctccatgagctgctggatgtgcttcatgaatgatgacacgatggcgcgacggacttggttgtccgaggcgttggcgctcatacgcagtgtgaccagctcaagctgtaccacatctgctgccacgccctcacgtagactgtcgaacaagctgactgatgcgtcgtggtggaagttgtcttcctcgtccgcagagaaacttcctccctcagatcgtgtccaagaggcatccgagacctcggatgagagcgttgaaatggaggcggtagaaagtgagagattgggcatgcggtacactgtagttggcataaagttagcggtccggaccagaagagacgcactaggaaacaacataccaagtcccgatgaggctacgctcacgtcgtcgtcttcatcttcctcttcctcgccgtgaatgaactcgtagccctcgccattgtcgccaacgacgctgggatcgttcttggccacaccgccgtcgtttcgagttttcgtgatgcgtttccctttctccacccagatgttatctgcgattttcacgccataggagagaagcgatcccgcttcaacggcacaactcctgccgataaccacgccatcagcaataatcgccccacggatgtctgagttatcgccgatcacaacatcgtcccaaatataggaatcattcaggttgacatttcgaccaattttacagtttcgaccgagcacggagttgtggacttctgcccggtctccgatgctagtgccttgtccgatgactgtgcggcgcccaatgacgcaagagcgtgccagagttacccctgtttcttggtacatgctgcccttacgaagggtgtacgagtgaccagggagcaagttcgtatccgggcacaagggatatgtccagcgcgacaggatatccttgctaaccgcatcgtaggccttcaggttgcgcacgcgcgcagcgtactggtccttgatgatgtatgtgtgcagagtcttgccgttcagctcataatccttcaagacaccgtataagtagtgtttccgcggggattgataatcgaaactatctgaccataagctcagtacgtccggggtgcagatatcgatgctgcagtcgatcaagtcttggcggatatccagctcggggtgtttaaggataatttcggcgtcaatattcagacgagacgattgctcttcgtgtggatggcgatcgatttcctcgtagtggagacagcgatcctgggtagggtcaatgacgaaaaccggcgaaaccgatgtggacttggtcctgtgccgcaggccagcctcccttagaaccatggtcatgatcgcattcttgtcaagtgctcggcgggcccggtgctgagccaatgcgccctcaatgggcaggttgctgatcacgtcgccgctcacgacaatgaagtcgccagtaatgacgtgcttggcatcgaggtcgcgcataacgtcaccgacggatgtagaggtcgacttcaggaaggtcagttgcttgaacggagaagatggagctctccattttgatgcactagcagtataggtcagctctgccatccatatcagagggagtccctagggcaagcctacttgatgtatttctccagctgatccgagtgcgctcccgcgtagaggaagacctcctccacacctgcattggccaggaattcgagtgtatattcgataatcggagtattcgcgagtggcagaaggcactgtaataatttggttcgttaattgcgaggtcttggggcatgaatgttttgctgtagggacatacacgaggcttgtcacgggtgaagggctcgaatctcgtctcgaaggtatctgcgagcacctaatcaaagccacatgtcagtaaagatatgtaacagagagaggactttggcaagaacagtcatgcaaccatttgccaactgctagacctaccacagcttggaacgtctcttcaacttcctccgccgtgttgggcttcggcttttgcccagctttctgcttgggggccattgctgcaaggcgtattagcgacgaattctttatcgctctagagaatcgcgagagctagttctcgtgaagagcagtgggaaggcggcagggctgttttactttgaatgtgtcaacaacccgttcaatctgaagttggcagaagtaaactgagatatgccacgagaggtccttagataccgtctccagaaatagcaccaaagaaacgcgacgatcttgttatcaaagaagagcacaaaaaagcctcggagtcatcccgcccacctgtttgcattgtttgtactttaatccaaatgtgttgcctgaggcatacagtcctgaataggtttagttcagtccctgtagatcagtagaatgcatcagacaatagagtacactagccaaatgaacacacgtgagtcaatagaacctcggaatacacctgcccaggtggacataggctgatgtagttcatctcgtacttcttagttcttagttatttcatgggagagtatcgcgataaatgcagaatgagtttcatagaggtatcaaatgactgaagaataaactgaaataaaacgccaaaactgggcccgaaatatgctaagccaagaaaattgaatagggggcataaaaagagagtaagtccttgtgcaggacaagtctttatacggtgaactggaccaggcgaaatcaaacaggcggctcaaccgtctgcagcggaacataaccctcatcaccctgcacagccggcttgggaccttttccagtgaccagagaccaaaacgaagaaacaacattcccagcgcgacgacgtagagagcccgggctatctgacaaaatagcagtagaagcccaccagctcaccttacgataatgaccgcgacgcgccacaccgagaggagagatctcgcccgaagcaagctccttctcaagacactcaacctccatccaagatgggcgacgccagaacttcaatagcagactgctaacaacgacagagacactggaaagagccatggcagcaccggcggccatgggcggtagcatgaagcccgtgaatgggaggaaaatgcccatggcaaatggaaggccaatgacattgtacatgcaagcccaaatcaagttcaacttgatgcgtttaaagaccgagcgtgacagggagagactggctggtacggagagtaggtcatccggacgcatgaggacgatgtcagcagcctcaacggccacgtctgtgccggatgcaagggcgattccgacggatgctgtggcaagcgcgggagagtcgttgatgccgtcgccaaccatggcgacgcgctcaccttctgcttggagggcggagatgattgagcgtttctcggatggagagacggacgcgtggattgtagaggttgggatgccgactgctgtggcgatagatatcgccgttgagagcgtgtcgcctgttaccatggaggttgagatgcccatgcgatgcagggccgctactgccgccacagcagtctctttcacagtgtcttggagggagattgttccagcgtagcggttgtcgattgcgacgtggatgcgtgtaatgccggccgcggtggcaccagttttgggaatgtcagcttcagggtcatcgacaggtgccccagagtcgggatctgcatcagcaggtacagggacgtctttggaccgaaggaagctagcgttgccaaggaggacgtggtgccggatacgttggccgctagatgtaggttcgacgacggcagagacacccttgccaacatagttgtcaacgtcacccgtgcttcctggtaacccatcttctccatgatgacccgattcagatatggccgtagagaagatcgctcgtccgattgggtgttcactacctgcctctgcgagaccgacaatcagccaccagagctgacggcgccagtcgttcattgtccattgaggttcaattcgggtgtcagccacgcgcatttgacctgtagtcagggtgcccgtcttatcaaagacaacatgagtaactttagtggcagcttctaacacggcacctcctttaacgaggataccatgctccgcgccgacgccggtaccaaccatgaccgcggttggggtgctcagacctaaagcacaggggcacgcaaagacaatgaccgagatgcagagcttcaagcaaaccatgactcggccaccactgcctgccatttcgaatattgtgggcggatgaggtagtatatgactgaggaacatccaaccaaagaatgtgatcaaaccaagaccgatgatggtggggacaaagtaaccagcaacgatatcagccatgcgctgaatcggagcacggctcgtctgcgcgtcctgtaccagcttcacaatctggctcaactgggtatccttcccgactcgaatgactttgaaatcaatggagtttgtgccgttcacagtcccggcaattatctggctccctttctttttgtgaataggcagtgcctctccactgatcatactctcgtcaacatagctttcgccctggatgaccacaccatctgcagacaccttatctccggggtgaaggataacgacatcaccgacttgaatcagctcggtgggaatgcatttatgattcaccgtcatatcctcagccaaagtcgcttgctcaggcgctccatttattggtttggaggcccagcgctcagccagtttctcggccgcgatgggatcttcgtagatggtcgtcatagatggggtcagacacatgagcctagaaagagcagcggaagtttggcccttggctcggttctctagccatcgtccgagagtgacaaaggtgataagcatcgtacaggtgtcgaacacagtgctaggacgcctgtggtccatgccgcaaagggccatgatcatggtgaaacagctgtaaaagaaggcagcggacgtgccgagcattacgagaacgtccatggttggggatcgatgcttgagtgacttgaagctggtgacataaaatcgtttgccaatgccgaactgcaccggaatggtaagagcgagacagatcaggtctccgagatataggcctgggatgagtgcaaagccaccaaagtcaattccgggcaaatacatcggaagaatcatgctgatgaggaagacgggaaccgcaaaagaggcggcgatgatgaaggctcttttccattcttggatctccttcgttttggacagtgactgaatctgtgcgttggtatcgtctgagtcgacaatcaaggcgttgtaaccagcagcctcgatcacttccacaatagaccggatcccgattgtagatgggtcgaaagtaagggctatacgggaagtagccatttttattgatgctgattggacacccggttgctgtaataagttgtcttccaatgctgtagcagaaacgccgtcccgcagcccatgcaagctcaaattgacctgctgcgtctttttggagattgacgcctgcgcctctgatgacacgatcgacgcatcaaacccagcatcttcaacgaggtctggaattttgctggcagggagtatggttgggtcgtgcacaacgaccgcccgctcagccagaagactgatgttgaactggattaccccagcaacactgcccaaggcaccctggacactagacgtgcaagcgccgcatgtcatgcctccgattgcgaccgtcgtgactagaagtccagattccttttctgtgtcagccgatgcagatggctccttggagcccactagggaagtgtccagcactcgcgctccaaagcctcgatcttcaatgagctctgcgatctgctccggcgtgatgatgcctgcatcatgttccacgactgcgcgctcggaaagtagtgatacgtccaccgagttcacaccactgacaccgttcaacccgccttccactgcagacgtacatgccccgcatgtcataccctcaaccgccaggttggttaccgagagttgcgtagccgaagacgaagaagaatcggggttgttttgttcctcggtcgaaagtactgccgcatcgaagccacaatcctcaatcatctctgcgatcttcgtaggcgctaacactgacggatcatgttgtacagcggccctgcccatgatgagactgacggaaacatcgcgcgcaccgtctatcccttgaaatgccctctctactgctgaagtgcatgctccgcaagtcattccatcgatcttgatagttgtgatggccagtgcgcgtcgactggccccgccggcgtgggggtttttagataacatctcgacggtgatgcgcgaagcgaacacggcgaggaatgacgggattatagcatatggagtgtgcctgacaaattgtctccgatgcgatggcagaaagtgatagcgtgctgagggacggatggttcggatagcgcaggggactaacagatcattcccttgttgggcagacaaagggagctgcagaagtcaaaaagaaatagtctgcccaggaagccacgtcggtcggatttatcgaaaattaagctaaaggcgcaagggagagagagaaaagaaagtggattcgcacgggaacaggcttcggtgatgtgacccgcatcggccacgctatggaatgtataaagtcgatgcaatataagcgtgggcagctgattagatggtcgggttttcaattagattaatgattcaccgaggatattacctaggtggaaaatacatattcacaaggggtcttggaaggcctgaaacagactaagccatacgaaaacaagtggttgtttcaaaatgtctacagagatgaacccagttacactgcatcggcttattgtcgctttttctctatacctgcagaatcgggctgtactattacctcaggatttaattccagggtaaaatagatacatacgataacaataagcaataatacaataaacagctaaatcaaaataaaattaaaaatacaaatacaaatcaaatcaacgacattccaaaggttggaatctcaaggactccagggctattggacttaatcagataaggcgtatgtttgcactcaatgcaaacaagcatcacaaccatctccacctggactacatttgatgctgcccatcttgaactcagctgccccgtacctctcatattgcagctctatcccttgattacaatccaacatcatcattgaaccctcccttcaaccaaccacaacatcccaatggatcaaacccacacacgagccctggaggctctccaaccattcatccacctagcccgctccagcagcgcgagtacgcctcgctttatcgccaatctcatcacaaatgccacctcaaatgcgcaaacctacgtctttgcagagctgctggagctgccggcgatccaagcattacggtcaccagatactccagccgagttcaagggctatctaaagctactagagatcttcgcgtggggcacatggcaagaataccaaagtaagaaatcatccatctagacgagatcgccctgagaaccaaacccccgaagctaccataacgaaagctaaccaccaacaccccgcaccagcaaccccaaacctccccgagctgaacaccgaacaaaccctcaaactccgcctcctctcactcctaaccctctcaacaacaatcaaacccctcacctacagtgctctaatgaccgccctcagcacaccaacaaaagccgagctcgaatccctcgtaacagcagccatctacgcctccctgataacagcccgcctctcaccagcctcaaacccaccatcggtgaatgtgacagccgtcgccccgctccgagacgtccaaccccagtccctccctaaaatgattgccaacttgagtgagtgggaatcgcgctgcggcgaggtggtctccgatttggaggcggagattgcgcgcgtcaagagtgacgctgcgaagcgtgccgcacgcgcccgggcacacggtgaggcgctcgaggaggctgttaagaggaagcaaagcgcggggaagaagggtggtcggcgtggtggtcggcttggcgctggcgtcgggggtagtaagagggatgcggacgatattgatgaggacgatgggttctttgagacttatgatggtggtgagcatggctcgcgcatggatattgatgaggggcctggtgctcgtgcgggaaacagtcggcagccaaagagggttttggggcgcaagtcttgaagtgcggatgtgttgattcacatgacactgtactcccatttgctcatggcttcgtggcgcagaggttcatagcggctccgacaggatttatgatatgaaatgacttgattatggttaaatttcttcttttacggaagacatctatctcatagatatggaacccgtggacaggagcaaattgcattcgtaaggccctaatggcgacgctcattaatcagaaaatagatacaatacaaagttgtcaaagtcgagaggggtattggtgaaagagaagaaatatcacagcgaaacaacagacgcaataaatatggacatgacaaagaggaagtagatgtgaccgctaataagcgggtggataaggcaggaggaggagaccaaaatctcttccgtatagctcttgcggacgaagatgggctgcagatctaacacacagtctctttcaagaatatgcatcatagaagcaaaacctcggtattcggacacggtgggaacgccttgaacaagtcaagtcaatcgaattgtagacatggtaagaatgatcaaatgatcagacagcgaacttcgtagagcgattgtttttggatgtttggattagatggaaactggactcgacgaaaagctcacagcatggtaccagggacgaagatgaacaagatgctcagagctgccgcagtgataaaagctatcaacgcagtaacaagggcgcgcttgttcagcagctttcgaacgtagggctcgcgaattggggcccaattcataaaggtatattcactgtagcccaggaacgccatgacggggtcgatcttgtactgataagagatgatgaagtatgcagcgacagcaaatggaaggatgacctggaattaaattagcatgctgattcaccagtacttagaagaattctcaacatacccagcaacgaatgttccggggcttattccgcaggacaacgtagaaggcaccccagaatcctccgccgaagctaatcagagcgaaggcaaggcgcaagataatactcaggggaaccatatttcccagggcctttgcttgcaagaatcccgggaatgcatcacgctccatggcctggaacacatagtccttggcagggtcaaagactacagggtcgtctcggccgtcatcttcaaccaggttgataattgtggaaaccatcgattctggtagcataatctctcgctccgagccaggaagtagatatgtgtacaagatcttctcggcgctggcgcggatatcattgcgggccactgtgtgcccaggggaggttgagtcgttaactcgggaatccggggtgtcacggccatcttcatacgaggatgtttgatgtgctgattccccggaagagcgcaggctgtttccccgggagggtgatgtggtttggccttcggagcgaaggaatgcagacaggcgttggtcggcatctctgtccttctcgttttcttggaatccgtttcgtaagcgagaagggccggcctccgtcagtggaatatcacctaggttctccagattgtctagcatggcagaagatcgtttgctatcggctctttccatatcgggagtcgcgacgaggacggaacggcggagttcacgaacatagtgtcggcacagtagcatgtgttgtgatacatcgagcctagagaccccgttaacccccggatacgggcattgaatgtgagcttacactcaccaaaagtctagatagtctacggaacgctgctggtcgcgcatgtaaatgtagaacgaaaagaggtcgaccggggcgagagttcgacggctcagcacctcaaagagtgttgggaggcgattacgcgactccgcatcgacaaaatcatgatgagacatatcggccgtatgcttctagttggcaagaccgaaatttcaaagccaaggcgggggagcaaaagggggagagattaaggtcgtgtcagggagcgaacaagcgatctcaacacaaccgaaaaacgtgagtaagacgaaggcgaggagaagcgaatgatcgaaaaccgagagcgaaatgagaggggttgaaacaaattgagctccacgcggtagacaatgaatggtgtttggatagggggagcccctgaggccacaactcgactaggtcggctcagcaacagcaacagcaaacaaagaaaacaaggaaacttgaaaagacaagtcctacaaaatgaaagacgtaagggtgaagttcatgatgctattccagccatcagcattcttctcgaaacaccgcaacaatgataatccgagattaagatccgtcaggggggaaattaccgttgaggtttgaggttattgcatcacgtctcatcatgcatataaacagtctaatccatgggtattaccttcgattcatgttcttctacaacctgcagttatcaccttccagggccatgctctatgttcaatgttgtatgcaatgggcatcaactcgaacgtcagccccacaataccaagcatggcatctatagatgtgattggtgtgaagatggatcagcatatccatccatggattgagctcgacgttgatctacgatatagattactagcactagcattagctcaaccggaaagaaatccataaactggcatccattcatagccagtgaaaactgcatgtggtaatctatcaacagggtattgcccatcaaattttcaatccccaacgccgtcccataaaaacaccctcgctgcagtaaaatgtatgtcctgggatcaatgattatcggcaaggtgctagatgccagagttagcattttgtcagaaacaccttcatttcaaatacttaccgaccactccggaatgtttcggatctgctgccacatgaacttctcgagcttatttgcactcttggcgtagggtgtggtctcgttattgtagcgtcggcaattgtcgaagatcaacatggcatccttgatgaaatcctgtggggtcgggtacaagtccttctcatgcttctcttccatggtcgacagatccataggctccaagattacctcgtagtagtctggaacctcatcacggttcacgggctgagtaaacggccaggctgcactgtggttctgcatatcgttcaacaaatggagcaattgattgtaattgggcccatggcgtggttggcgagccatttcatccatatctggggaccatccggactctttaatagcggggatgctaaggggatcgattgggaacaccccgttcttccattccttcggaggagggtggatgatatgcgagcgactgaaggcacggatcttggcttgcacggactccttctgcttggtgagcatgcggcccatctccagataacggatcttggggagcatggtacactgcatgagcgtgccaccctcgtaatccttaatgtaacccatccagattgatttatccagtgtgatctccttggtaaagccctgcttcttaaagtatccaatggcgtagttatcggcatacgtgaggaagtgcatgatgggggaggtggctttcacgtagtcctaagccgacaaatgggtcagatatatgcataggaagcagacctgtaagtgttcgtaccttaagatgggacatcaagtgtgcaccgtatcctttcacttgctgatccgaggaaatcgcgcagaagacaatctcggcaaatttccgagcatcgaatggacgatacgtgattcctctatagtcggtcagtatcttgatccaacaggcagtactcggcactaataacatacccaacaacttccaatggatgctttacaatagccatagacagatgggatcgatcgtagacaaggcgtgcgatgtagtccttgggcatctttggaagttgcttctgaaaaatgcactttaagcctgtcaagacgataaagctatcgtgggaaccatcattgttgacgacacggaattcaatgtcgcctcgacgttcttcgagaacagcaggctggctgtcgtcagccaatgtttctcgcgaatagacacgagagtccatggcgtggggtgggaaggtaccttctcagggaatggaacaatgcgaagcggaggccttttgagagggccatcttcctatgcggggtgcttatcagaacaatggccgataggcagtatggagatatggcgacatggcggtatcggtagcgaagagcttccaaggttcttacctctttcacgggagaatctgttcgtgccttcttgattatctgcgacccagagtccggggaagctgcctcctcagaggctttgcgcttgaaacctgatagcatagcgtcacgttagatattgttttcccaaatatgagaaattataaaattcacgtactctttggagaatcaacaaccatgatgtcctggatcttcaaacttgaccctgcgttgataatgacatggggtaactatcggtcggaacaactaaccaccggtcggggccagatcaacactgtcgatctatatcactttcacattatctttaacctgaatcaatttctccctcaattgcattaatcatctattgtcctaatgtctctgaacgaagtctgggaggcagcctctgcaactccattcatccctctcattgccaaggacagccagttctctgtcggctttaacttgctcctcatcggtaagcttcttggtctatcatagctttgaaagcagcccgatctctgactgatattgatagcattggttaccgccactctctttggcttgagtaagttactttattaatttcacattgcccaggtggaactggacgctgacttcatcaaacagatcggtctttcctcggcatcgtgtccttaggattcccggccgcattggcatttgggttagtaatgcgttgcgtcccatttctcaacacatgatatactgattgggtattctggatagctttggagctgtgttcatgatctgcgccgccggagtctacgtttaaccggccacctttcctattgcacgtcccactgaatgtaccataagcgttgggttcaaaggggcttgtactgctagaacatccaaagtcatcacgcatcttgtgactcatcatctttgctctgtgccagtatcgcgcttgaaaagttcgagctagcagcctacataacaaaatggagccccttttcgccggcgttcccaacaacgcccaccatctctacacactgctctcctgcattggttttgcgcacaaggccactgtccaaattaccccagatggcctccgattctcagtggaggaaggccgcgtcatccaaggactcgccttcctcgacaagtcgctcttcaccagctacacattcaatccatcgaccgaccctgaacataacaaccagaacggaacgccccaagacgacaacgaatcttcacaaaatggggcttaccctcattttgtcgtttccctctccgccatcctcgaaaccctaaagatcttcggcatcaatgagttccccgagtccaaccgaccccgtgacactagtatcacgcaaagcgggatcgcctcgtcaagtgccttcaacgctccagccctgctcatggatcgctcctgcacgcttcaatacgcccaacatggcgccccgcttagcatcactatcaccgaagctggggtgaaaacaacctgcgagctagtcacctatgagcccgacgaagacgaagcagacattcccctccagcgcgacgccatcatcatgaaaatcatcatgcggtccgcctggctacataatgccatcgccgaactcgactcctccacccccacaatcttgaaactatccgcctgcgccaagcgagaaccgtacttcgctctctctggtgcgggtggcccgttcagtgaatccactgtggagttctcggttgaccagcacaacgagatcgccggtggcgctggtcagggcaatacccaatctcagatgcataaggtgttgttcgatgatggctcttcgcgggctcgcgcaactagagctaagcttgcgcctacggtcacggagactttccttgtttctcctccttcttccatgggcgagcgcattcgacagagctatcgctttggcttggttcggaaggctgcgagagctatgtctgtcgctaataaggttagtattcgtggggatcggcagggggtgttaagcttacagttcatgattgagcttgacgaccataatgtgccaatgggcagaccggttggtgctggcgtaaagggtcccaatggacctgtgtgtttcgtggacttccggtttgtcccattgctagacgaagaggaggctgagatggagatggacgcaggaggtgaatagccgggttaggatcaacacgataatcaatataaagagcataccccaatttgaatggttaaagtaacagattaatacctaggtagggtgcaacggttactaaggttgaagactacctaggtacgtagtcatttacgtacaaactctggtatgaaacaaatggaattcaaggccaaaaagccaccgcaatcagaggcgctaggatatcagcctaataactagagcgagaaatcaaactccaaagacaggtcgaacaaatcatgtacatcatcagaagtgcagacactatcagtataaaaaataaaataagccacaaaccagccaagccacgaatgcgaatatgtccaaaaggccaaatccaaagtgcgtcacaaaacgccagagttaggaaaagaagcacataaccacactcaagcatgatccggattgtaactcgtttcccccagcatactctgaccaacaggcgcagccggagtgggcgtagcaggacgcggcatcgacgaactaggctctcccaaaccaggcgagtgagcctgcacacgcccagcagtagcagcctgtaacctgcgatccaaagccttgagcgcaatagcacgtcttcgctctgcctcctcgcgcttacccgctcccctggccccaccacgctggctattcaacagtgtcggcaatcccgcctcgcctctcgccagcaccagctcgttgccggaggcgatatcgtcctgcgagaacggcgtcagaagcttagctgcgactagcaaagcgtagatcttgtccgcgacgaaggccacaggcggctgcattacgtctgggaatagacaggcgaaggcgaaggtctcactcgcgtcgcctttgatgcctgcaccgttcgaggtgccggttaggtcgggctgccgcttgtagaagcggaggtaggtccagcttgtgaggaggccgagccaggagaggattgcggcggtgtgtgttccgatgatgaggccgctgatggtgtttaggaggaggaagagggcggggaaatgctttacgcgcatcttgattattcctttgaagattgttacggtgtgttctgggacgagctgtttgaaagccactaggaaggaggcttggatggagactccgccgcagatttgggtgaggctgtttggttgggattgttagtacttggtatggggtggtggtaactggtttgctcttgttgccggaggggaagggagaggggcgatgcgtacgctctgcttgaggagcccccgattgctccccagattaggtagattggaatgatggcgatgcaggggatcacggcgaccaccgcgatgaacttgctgaactcgcgggagccccacgcgcgctcgaggtatttaccgccatagaatacggtggcggcatttaataccacggtgaatatattttgctcgacgaaggtggccgtgacgattgtccagggatagtaatagaagaacgaggggacgagggtcaggtaggggacgagaggagatgtggtcggagttccgccggtggtgtcaatttgtcgccatctggcaatgttgtagagtagggagagggtgagaaggctgacgagacagattcgagtagcagggggaatattgattcggagcgacatgttggagctcgcttggagctgcaaaacgccaccgtagagatgcgaaagttgaggtgggagacttggagagcggaagtagcatccatgtttgtttggccccgagatgcttcaaaggcaccaacatcacacacaacatccacatagccatcgattatagttatcgagtgatgtttcatgttattatctcgtttcccttactatttagttcataatatttcttttctctttctttttcattcctatttctacttatagaatatgatttgaatctagaattagattgaatgagtgacaagatatcaaggccagtacctacataggtacctaggtaagcagcacatattgttattaatgatctattaacggcccaaatttagacacaagtgtaagatcaaacatccaaccttggaacattcaacatgcaacggagtagcctatcagacactccataatgggacccctggggtaatgtagccagcaatagtaaatgaaaagaaacaaccgaagtatatccaacttaaccagtccgtaaatcgcagtaagcaaagaagtccaaaggtagaaagtatcccgtactttaaggatgttaaaggatgcgccaatgtcaggtcggtaactggcggcatcattagccacgatccaccatctgcgattgatcctgcaggtccgggtggatgcagttcaggtcattggtatatgatgtccgaaaggtagaatccctgttggtagatattattataagtgtaagggtaagggtaagttgtgacacaggagaagcactccggtccttggaattggaacttttgaaaggtgccagggtgctcgtgctgaaatcccccgatatgtggagaacccccgttttttaggcgcttagcaggagagtggtttgagaagacagagtacccctgagagatagagtgtccggagtgtttgatgaagtttggaatatcagatagatattggtagtgttagattgatacctcattcatagaaaaatgactggagagaagagatcgagaagtgtggaggtcaacgccacacggaggatccagtggctagtgctaaaatggacttctgccaaacattctggatcctttaatctcagatcttcacttccctctccctctctcttcttcgaatacttgattcctattcctattgagatttacagatctctattcttcctgatcctttaacctcatctcttcttccctccactccctcaccttctttcaagaccccccaaatctccaatttctcccttgtcttggctttctcttcaatcttcaattctcagaatcttagattctgtgcgggaaatacaagcaccccccttttctatttatccggaagttcctacccccttccggcctcgtgttccgtgttcctgaagctcgcgcatcgaagcctccactttggttttccatcggcagaacagctcttccctcttctggcatgtccgtggcccttagctggtcgcacatgtaatcatggcacaacctgacctcacgtcgcatcatgtcaactatttaatatggaggtaagtgcaatacagcccatgtgtctcctgcagaactaatatctttttaggtacctccaagaagccggttggtcacattgccccttggctttccccttcaactttgacctctaactcaacctaggtcatggcgatgccgccgtgtctttgcagcgtgcgtggttccctgatccgcaaactctcccgtttgcgccttacattaaaacccatgcgctggtgtcgttggtccaaaagggcctccaataccacgagttggaatcctcgctggacaaggtacgtatttcattttaaacggttcttacgcgccaaaggggggaaaaaactactttctttttgggttcctcaattgaaacccaaactaattgtaatgcgcaggagggcaatcgcaaaagcatttcaccgtctgactatttttttgggccagagccctttgaaattggagccaaagctggatcggtgaaatgtccagatgaggttgtcggcacagacccagattcgccgggtcaacttgcgcgcgaccgcccggtgaacggccatgccgagcccgggaaggacagccgaaaagacgaaactgatagcgatgaatttatggaggacaaggcgcaaactgaaagtcagccagatacccccgatcatatggatgaggatggtgatgtcagcatggccgaggagatccctgaactaccgaccctggaaaacggcgagagctcttccgcccagatcgcccccgccaagcccatcgatttgacacccgacaccgccctgctggatctggatcatcacgtgacccatgccgcatggcgccctcgggatccaactgtggttgtgggagccggtgacctcttttgcagcttgtggaagttgtccatgtcgtcggaacctgtccagaagagaatagtcgagctcaagaagggtgacacaagtgtctcgactgtagcctgggatgccattggtgagaagttggccgtcgcgacttgtactgaggacaggggcactatcaccatgtacaacgtcaacggggatgcagtggatttgctacctgaagtaccccggcttattactggcttgcactgggcaactggcagctcgcaactggtggttgtagcctcgaatcataacgtatcggaactcgcgctttgggacgacagccgccggccagatgttttccctccacctcaagtaattgagaacaatatctatgatcttgcgtggtgtggacgcaacctggcatttgcttctggtgacggtgcagtctatcaatgcgaagtggacaacagcatccgcttgatcaagacattcccttctcccagagacaacgcaacttgggagtttattcgctgtgtccaaaccgagtctcattccgttgctatcgcggcttctggactgagcgcttcaatttggatccctacccatgacattcttatccccgacgcccacaaggacagaatcaccggcattgatatcagccctcaatttgacccccatcgtattgaatttgcctctttctcagcagatggtaaggtcaaggtctggcaagtcaacctggatataaaggattacacgaacttccatcagctgagcctagactcaactcccgctattaccggatctttctcgccggatggatatgctctcggtgcggctagcaaggatggcctctttatctggaacactggacaccctggtggtaatctcatgtctacctggaccgcaactagccccgaggtgaagaaagaggagcccgaccgcatgaccaatggtcagaatggacatcatggacagaatggacattcaaaatcagatccccatcgggccctctcctgggatgcagatgggaaacgacttgcctatggcttcgacaaacaggtaagctccgtggtctggtttacccgtgtcaattccccccatgctgacagtccaattcccttagatggcaatcatcaacttgcaacgatgacagagcgggtttgaaacagccacatgaacactcacgactcatgccctgcttgaactaatccgacaatcccgcttgaaaagccttctcagtctctttccctcgaagacatatcaaccttcatggttttcccgttttttttttttccccttttatcctttttgtcttctatgaacatacatttttctttagaaaatgcataatggcatgcattgcttgggacaggtttgggtgagcacggcgaatgacatggactggcgacggtggacttttttgcccttttttttttttaccctaacccatctcaggtggatctgtgatgtctaaaactcacttttagtgtctgataatcaagcaaataccccaattttcaatggaagccctgtccattataggtacatccatagtcccgacctccggagataggcctctatcgatagtcgataatacccctcgacgctagtccgcttcgggatgcatatagtcacgcgctggagggcacctgagcacacatgtgagacgtgcaagctttttcaagcttctaaggttttcatttcaggaaatccgtaaggaggcataaaattgatgttaagcctacaattgccatcaccgttgtgttaacttttcaaatctcacatcagcaaactggggcccgccgtcagcatacccacccgtgaacagtgtgaatcgttttcccgcgccaattcaatcctttctctttactatccttcatcaataccgggcatttataacaaatggcaactcctgtaagtacacaactgtcttgccgctgtatttccccgcccttcgaggccggagattccaaggtagtgtttgcacttattgaccaatgactcaggtcgtcaccatcccgtccctcgagacggcgcgagatgtgatctccaagtcgaggaactccgccttccctcccaacctacttccggtcacggcatcgatcgctgccgacctcttaaccccgacattggcatacttgaaaatcgcagagaagtgagtcattgggttctttccaacaatgacgataaggcgcggggggggggatgggatattggacaagatagctgactcgcagggatagttcacggttgtcattcttgtttgaaagtgctgctaccacggagaccattgggcgatacagctttgttggtgcaggtgggtaataccgggagtctttggtccgattccatcgcttaccacttcctcccatacagaccccagaaaagtcatcaagactggcgaaggccatggcccagcagccgatcccctcccataccttgaggatgagctctctcagtttcgcgtcgcgacagtacctgaattagtccttccacccttgactgctggagcgatcggatatgttggatacgactgtgttagatattttgagcccaagacggcgcggccgatgaaggatgtcctcggagtgcccgaatcgttctttatgctttacgacaccatcgttgcattcgatcatttcttccaagtcgtcaaggtcatcacctacgttcccattccctcggcggatgcagatatcgaggcctcatacctcaagggccagtccatcatccagaagacgattgagaagctgctccaggaccgcacgccgcttccgccccagggcccgatcattccgaaccaggagtatacatccaacatcggacaggaagggtacgaaggccacgtcaaccgattgaaggagcacattgccaagggcgatattttccagaccgtgccgtcacagcggctatcacgacccacctctctccacccattcaacctcttccgccatcttcgcaccgtcaacccatctccttatttgttctatatcgactgccaagacttccagcttgtcggcgccagtcccgagctcctggtaaaggaagagcgggggcgtatcatcagccaccccatcgcaggcacagtgaagcgcggcaagaccccggaggaggacgccgccctctccgaggagctccgcagcagtctcaaggaccgcgccgagcacgtcatgttggtcgatcttgcccgcaacgacgtgaaccgggtttgcgaccccaccacaacacaggtcgaccgactgatggtcgtggagaagttctcgcacgtccagcacctggtctcccaagtctccggagagctgcggcccgacaagacccgcttcgatgcattccggtctatcttcccagccggcacagtctccggtgcgcccaaggtgcgcgccatgcagctcatcgccgagctggagggtgaaaagcgtggcgtctacgctggcgctgtcggatactttggatataacagcgccaacgcagatggctccgctgaaatgcccggtgcgatggatacatgcattgcgctgcgcactatgatgctcaaggacggcgtggcgtacctccaggctggtggtggtattgtcttcgactcggacccctatgatgagtacattgagacgatcaacaagcttggtgccaacattgcttgtatcaagggcgccgaggctaaatacctgagcatggagaagtaatagacttggatttagggataaaacacaagcacattatgtttcttttttagcaggagcgtcggcccccgagggttacacaatgggatatggtgtttttgatgtggtgacgaacagcattctgaaggtcacacgctctctaacgttgaatttcggtagattatcatgaaattatacacaatttttatgcccatcgcattctgatatatactagtttcagcgacttctgaacacgtcaattgcgaagtccctatgtacgttccaaggtcgtgctctcaactgacacactcctcatgggaagtagatcaaggatgaccggtgaaacacttctatattgcacaatatagaagattcaagaaaaaatgtccaacagtgttatatacaacctaacttggatttgtttgaagggtcccctctcctctctcctctgtctcctcctcgtccttaagtcaaacaacaccgagcattacgtgaatcaaggtctcggtaagccctggttgagggtataactactaaccggttagatggcatccatgaccttgcccggtctagtcgtaggtagatatttagttagatatatatacttctggtataggccactggatcacactgggcatgcgcaagcactgcttcattcatctcaaaaacataggcacgctttcagccctagtggattatattcaaccacaaccttagagcttagttggtgtccaggcaacagctctcagaggtgagtcggcgaggctgtggaaacgcctagtgaggctgagttcgtaccccatacaaatcattcccaggcttgcattgagcttggcgctagcaatgtcacatttaaggttctctctcgcatactgaggtgctcttattccctcagctggtgctgcgccctgatgactcaatatttgaagggttccgacttcccaaggttcttccctctttgagtcacttccgatgacatcttccgacatcttcaaataagacgaaatcgcctcgagaccaaggcaaatcaaaaagggaaaaaaaagcatcaacagcgcaacatgtctccatcattgaaatctcgcgctcaagccgccatctggggcgtctgcgtagccgacgcactcggtggccccgtacaattcaaagacccaggaaccttcaagccgatcacatgcttaagaaaagtcgcgcccttcgatcaaccagccgggtcagtttccagcccatatatgggaagtatatgctactaacctgaatagatcctactccgacgacggatctatgacactagccttggcatgctcgttcaacaagtccaacatgcaatacaaccacacgctatcaattcaatactttgtcgagtggctaagaaacggccatttcagcactgtcaaccactcgtgggatgtaggacgttctactcgcatctccctgggacagtgggagaaatacggcatagagaagggcgattttgaacttgctcaggtgatggtcaatggtagattggaatacgaagagtactctgggaatgggagcttgatgaggatcgtcccgattggactggtttactggcgagattctaggttagcgagggagattgccagaacacacggccagatcacacatccttcgctcgcgtgtgtggaagcctgtgaagcgtacacggagttggtgtgcaaggtcatgaatggttagtgttttttattctggtttctttcaagacttgtccactgacggttttataggcgagacgaagaagcaactcttccacgcggtctccgtgttcccgtttactcattctgctctgaaggagcgcttgtcgctgtacagatacaggacaatcagtgactggaaggcaaaagagcctagcgatatgaaaagtagtgggtgggttgttgatacgcttgaatgtgccttgtgggcattcttcaagtatgatacttggaaggatggggcgctggcagtcgtcaatctgggtggtgactcggatactgctggggctgtttatggaggtcttgcgggctcattctatgggtttgacgctatacctggtgaatgggtggatgggatgcagaataaagggtttattgggagtattgctggtgctctgtctgatgggatagcttgagatttgggacttggaattgcactactaagattaacatcataattgttctacctagttacgttcaaatagccagggtacttccctgcgtaaacaaatgtccatatacagattgggaaggtgcgatgtgacattgagaaggtgcaaggcaggtggtccatttcgggaaggcgcgcgtgttgttgggggtataaaaggacccctcccacctttcttcctcttctcttcttcttccttcttcctctcaaccctctcgatcacaatgtctctccgtagcccccagagacagcgtaggcggagggttcccggcatttggtgcttatatctacggagatgtcaacattaccattgtcgagatctgccgtatgccggtgtgcaccctgatcaagctcaagttctcgtggatgttctttgataaagtcgtggctggacctttgggttctccatagccacttgacagatcccacggaatacattggggtgttcgatcacaccctttttcattatgtagctagatacttagtagttgaatccatttactgtcgtaggttgtagttatatgtctgcactagagtaacaagcgttcctgaatacattaatgtaggcattcagagaggtctcgtattagggcgatgggatagcccctcggacgcataaagggttttgaccaagcttgccttggtgatatttcagctcctgcagtccaagtttatccttcatgatagcaggatgaagcactgtctctcaggacgaccactgtctctcaggacgacatagaaagaccagtagctcttccccatactattcttcaggatattggccatctgtcaccaggaattgggtccattggtatgctaactgaaacccaccctgctatcgatatgtgctatgtaaaacaaagtgaatacttatgtagtaaggaatggaatataaaacttcgatatcaaccccaatgtggacctccgatcggagtgccaagagtgtcgttgcattctagaaacgcaaatgacgtagtctggttcttccaactgttgagatttcaatattttatatgaacgatactacctacatacctacaatataggtacataaggtgtatactagtagaagtagatataggacctgcagtccaattgactgttgcctgaccacgaccaaggtcctgacgcggcccaagaccgccacatgtggcgggaaacatgccatgtctttttttattccctttttctgatagaccctgcaagaattggaattggctctgatagtacatgtcaaagaagatgagtgtaaagtcgaacagtgaatcggttatcatgggctatatatagaaggggcaaaaaggagaaaaagatcacggcgattagaccggacctccggccacgagggcgtagcggtaattgggaaatgcactggacctgtcagaacatttaagggatcttggagctgtttttgttctatgtctgatcataaatgaaattgaaaaatccaccaggctgaaaggttccaagtgtagatcttcaacagtgccagggtgtataagttccaagctgcttcgtcactgccaagccctctcattcccccccggtcgagcccatcccctctcctctctttcacttttcacctttcatccgttgactgtcgactattgtttgccaatatttccctttcaggcaatctaaccctcaatcgttttaacctcttttagaccaatctgcctgtacctttcagaatagtcacgtttgacaaccaccttaagccgcgacacggagaaagagggctgtgtgtgcttggcaatctattactcttctacaattatccatcgcatcggtttccacccgactacgatccattccctttaccttaaaacagcgaccgtcgcctcaccgccaccatgtctaaagtcgtgcggagtgtgaagaacgtcacaaaaggatattcctcagtgcaggttaaggtccgaaatggtatgagccgattcctctgcatcgaacttccgggcgaccatcgagtcgccgccgcatatgcagaactgccgttgccatggcttgctgcccctgtcttttcccgggtgttgcttgctgcattgcgcccatgcaccccgcatacattgtgaccatgttgctaacttacttcttaagccactagtaatgacccttggggccctactggcaccgacatgtccgagattgccgccatgactttcgggaggtgagttgggtctgcgatcaaccctgtgggcaccgctaacaccatttacatgatagcccgaatgagttctacgagatcatggacatgcttgacaagcgactcaacgataagggcaagaactggcgccacgtgctgaagtcactgaaggtcttggactactgtctccacgaaggctcggagttggtggtaacgtgggcccggaaaaatgtctatattatcaagactttgcgcgagttcacatatgtggatgaggaaggacgagatgttggccagaacggtaagttgtctcttgaaattcagcgggagtcgcaaaattgacatgttggtgttctgtagttcgcgtcgcagcaaaggaattgactgcgttggtactggatgaagatcgcttgcgcagtgaacggtcagatcgcaaactctggaagactcgcgtgagcggactcgatgaaggctacggaagctccagcatggaaccgccgcgcagagaccgacgccgacgcaacggggacgacgattccgacgctgaataccgcttagccattgaagccagcaaggccgaagccgaggaggagcgccgacgacgtgccaaggagacaatggcaactcaggacgacgaggatcttgccaaggccatcaagcttagcagggaagaggaggacctccgaaagcgcgaattagaagagagcaacgcccaatctctcttcgacgacaccccggctcaagtccagccaaccggctacaaccagggctaccaacagcaaggtgctgtggactggttcggcaaccccatcaacccgcagcatcctatgacaactggttacctgaacaaccagtatgcgcagccgacaggattccagaatcagcccaccggcatgaataacccttacgccaacggctatcaggcgcagccctcggcctttgatcagaacccttacggccagcaacaaaacaaccttttgcaaccgcaggccgctcttcaaccccagcacaccgcattcaacccgaacaacccttacggggcggatatcttctcgcaacagcagcaacagcagcagcagccccaggagaactatcagaccgcaggaagcaataacccatgggccgggaacccatcccagcaactgcagcccgcagatgccctcaagcccatgccgacaggatcaaacaaccccttcgctcagcgtacgcaaacacagttcaacaaacctgcacaaacaggcccgccgacacttaattccctgtcggaggaccgtgcaacgaatcagtttgcccagaacaatgcgcagtatggccaaagctcgcagttcgcccaacccactcagcccaacccgatcgccggcttccaagccccacagccacccaagagtaccccaccacaggaccctcaccatgctcgtctcaacgcccttctcgggtcaggcgaaggcctggataccttcggcaatgttggagatctccgaatccccgcacagcacacagcacctggcacatttgtcaattctgctggtcagggtttggaccgcctacacgctacgcctaccggaaacccattcttcaaccaacaattcacaggcatgccgcagcagaccggctatgtgcagcagcagcaacaaccggctaataacaacccttggggaggccggcagcagcagcctggcggcggtagcctgattgatctgtagtcactgttccatggagctcttctttattgatttcttcccgacttcgctaagaccactcacgcggataccatctatctcatttttttctgtttctcgttcaatcactcggggcttggtcgtcgatttttacccggtctcatttttcttgtttcccttcatttctctccctatctttacccgatactcgccacaatcttcctgcacccaagaattgtgggttggagccgtgaaggaagcctcaactcaagctttcttttccttcgtgtcctcgatagcctacatttggatgtttgacctgggtccttcatcccgtcttgtattcccccctgcctcaagacacttttctttgtttccgccattgtctgcccattaggatatccttctcatttcaaaccacttcttgacatattaccagactccctcatactgcatagttctagcccaagtatggttgcaagtctagtcaaattgattgatactagctgagatacttcagtgtctgtgatcaagattttcctgacctctctaaaaatgaccatgttttgcgcctctcttttcgtaatattgttatatgtcaagtgcaagaccaaaaccaaaaccatagcaacacagaagagcgaacctagttaccacgccaaatcataataccatagggatcacgatcagcctcactaacagaaacctcgacagcgccctgctccttagcaaggttcctgatcacaccaatctcatcattcccagcctctaggctggcactttgcccccacaccctcgtaacctcatccagcaatttaggctgcataaccgaacgcagatacccacgctccgagttagtatgcgaaagcgaaataacaacagacccacgctccgtagcagccaaagcctcatggtgactcatctcacccgtcaacaggagatcaggcagctccccatcacccttgagtagcacacccgatcccgagccgggacacatgcccaccgtgcggatagagatgtcatcaacggactttccttgcgggacggcgatggggataccgcccggcagtccgattccacgagcgatgttgtcgatcagggtagtgaggggctggttttcggcgaatgtcaccagccgaccggcaccggctgactcgaatccttcggggattgaggctggcggggatgggtggattgtggacctggtgtgcgctggtccggtggtttgggcttgcacggtggggatgggtgagtctgggtaggttggggcggagtacatgctcgaggtgcaggatttgagggtggtgttgggggtttgcgcggggttgaagttccctgtcactacgtcgcagagccagtcggccatgccgccggggacggtgtcgactgctgtgtggggggagtagacgctgattccatgttgggcgaggcggaggagggatctttgttgggtgtcggcgaaggtgagggatttcaggccgcggaagatgattgggtctgtatgattgtgttgtgttagttttgggttcaattgtagatatttgtcggagttcacgaggtgtccgattgcaagtatgctgactccttgggtgagacttacggtatgcgacaacgatggagttgcggtttttaatggcctcgtcagcaacggctgtggtcaggtcaattgtgaggagggctgagttcttctgtatccgggatttgtcgaacggagcttcgaggagcactacaattgaacgagatcagtacactgtaacagcgaatcgaaggatatttcgaaaagaaaagaaatagagaaacttacatcctgtattatcgaagctcttgtctgccaatgcttccgggtaactgcatatacgaggttaaaaaaagctccatacaatgcggggagctttgggagcaagtggggggtgaaatacagctttctcatggagctcaccacagcattggtgaatggcgagcattccgaagatatcattgacgcagacatgacagagtatcgacgtgtagcagcgcgcagaaaattcatagagagacgttcaacttgaagatagccctggagaacaggaagggaaaatgataatgagccacacacgtgcacgcaccagccacagcggaccggaggctctgaatttgtaatgagagcaactcccatacttcgcgataacctcgggtttggcactctatctcctctcgtcttttctccctttccttttcagaccatccttgatgttctcccgcacttcctctctcaccgtcctgagcagaagctgccgctatcttctccgcccccacaacaatatccagcgggcttcattttccctcaccgcgcgctcccacgccgccatcaacgccgccatggccgacacatctggtatcaccgcggactcgctgaagaacaagttgactgaagcgctgcaggcgcagcatgtggaggtggaggatctatcgggtatggaattgacattgaaattgaaaatgggaatgggcatgggaatggcgctatgacgtcgaagcattctctttttctttacccttgttgatccctcgctgacgttctgtctttttcgggttaatataggcggctgcggacaagctttccaggctgtgattgtttctcctcaattcgagagcaagactatgcttgctcgacaccggctcgtcaactccgcgctcaaggccgagatcgctgctatccatgcttggacacccaagtgctatacccctgagcagtggcaggctctgcagcagtaattcatctctttaaagaggcgggaatatgatgaaatatgcctccttcccagagggatatttggaagaagctgggccagaccaaaggttaagggtttcgacttggtccaggaacgaagaatcggccattgatttctaattgcttgattcaactatatgcttgcctatctaattttggcatcgatttctcaggcgttggccgggttggaaaggatggaatattgtacactaaaatcctgcgctacgtagtgccgttcagcagggaccagaaataaatcctgtgcatggtatatatctttcttccactatttgcaaggagattagagctctatctagggatgactttaaccgagcaccttctcggcagcggaaactttggaatgatgttagcatagaacgatgtgctcgacagaagagagacataccatccagaccggtgttgtcaggctcgacgaaagcctccttgacctttccatcctcgacgaggagaacgtagcgcttgctgcggtcgttgccgaagatggcgctgctttcgaagctgaggtcgagcgccttggtgaactcgccggaggggtcacccaggaagcggatctgttcaaatacaatatcagctctgttgatgggaccaagaaataacaaaacaaagaaaagaaaacttacaccgctcttgccggagggatcgagggaatcagcccaagccttggtcctatatgatagctttgttaacaaacgttccaacgcgtccacgcttaactcgacattgatgacttacacgaaggggtcattgacagagatgacgaaagcctgaccagcctccttgagcttggggtggttgatgaagccgggaacgtgggtgcttgagcacgcagggccttgaagaatatcagtcccgaacaggttctttttgtttcctatcaatgtaggatgggctcacgtactgaaggcagctggcgtgccaatgatgacagccttgttcttgatctccttggccaaattgaccttgttgccgggggagttctcgaccaggacgtcgaggttggggatggcgtcgcccttctgtacgaacgcgggcgcggtgctgtggaagagggaggcttgcgcgcgaacgcgggggatgttggttgcgatacggcgggcgaacatggttttagattggttaaggatgggattgggttaattggatcaaagtgagagtggtaaaatgtgtattccgtacggttgttgtgaaagaatggggaagcgctagggcggtatgtcgagggagcttgggagatttcgtcatggccgtagcgtgcccagcattattcttaggcactctgtttacatctcactatttacatatgttgtatatgtactctgtaccttttttatattgatactattcgctttatgctcatctatccatacattgaccttattccatgcacatcatcgttgattggcacagaaactcgccctcggtctgtggataccagtgcgacctgcggaggctataccgcaggtacgaagcaaccttggaatctatatgagctgtcaatgatagacgctctctttttaagaacagggcggaccagccatccttcgaatcggatgatatcaagtcacatcctattcctccatgacgcagtggatccttgctcggtcacacggttcacacggtggatcatcaaccccctgctgaaggctgcagtcatcttctagttcatgttcaacatgaaggtcggcgttaacactgtttgaagaacaatgggcttgactggcagagctcaggtgatatgagtgacactcactgtgtgcttttatcatgacaatgtactacagtggagactcgtgttgggcttctttgagcactatctgaactaacttcggtggcttttagaccatgatgaaccagtttgcagggtgttaacagtattaataggtaattatttggtgaagacttggatttatagggtattcttggatcgtaaaatatcatggtgccatattctacggagtcggtatgttttacttaatatccggtctcggtaaaagtgggtaagtccgattaataggttcataagttcatacggagtagaaagcaacctgttcaaaccccgagcacatgctataggagaactgagacacgcggagaatggcagggctgatcactcaatgttatataaaacttattaaaaaagcgttttcagtggagcatatactgcttatccccgttattttgtacaaagacttgaaagacttgacctctctttacggagtactatctctatctcttctgaatccactctatgccaattcaatgtctcaccattttcatcagctcattggggggaagtgcatgctcccctccatctgcgcactgacacgatcccctccatgtctgtctgtcctgcatctctttttatttgatagcgaataagatctggttatgaagtttctctttcgtgttttcctaaggaacttgtatatgatacttggctagtacctctctatgttgtgtgtgtgacatactggaattttgcccctcgtgattgttaggatattcaaggtactccttgcattgagaaatgtgaatagaatcaagattaatataaacatgtatatatatatatatgtatatgtatatatatatgaacatgtaatcgtatatatacctaggtaaaaataaccccaagtaacctggaacacacctaagcagagagtccttgtaccagccagtacctccgtaactttggtacttggctctaccgctaaacccccaattcattttttttccctcttcccaccctccgtgaaaaaggtctggtcttctcccccttttctttcttttccagccaaaaaaacgaaagcccgttatatttgcaatcttttttatccgttgggaatcagccagatcctgttcgaccggtcgcgacccgtctagcccagcatggacggtggccagacctcttccaatcccgcccccgctgggaactccagtgattttgtgagtgatccccttcactattcgatattgttatacatcgttcactaacaatatgaataggtacgcaagttgtataagtgagtcttggctcttcaaatctccctgaccttttaatctaatgtttctagaatgctggaggacccaacctatgcgtcgatcgtacgctggggtgatgaaggggattcctttgtggtattggaggtaatgcgcccgtggatttgtgcgaaacagatttggtctctttgtgctcggctaactcgaaatcccgatagtgcgagaaattcaccaagaccatcctaccgaagcactttaagcacagcaactttgccagtttcgtacgccaactgaacaaatacgacttccacaaggttcgacaaaacaatgaagagaatggccagtcaccatatggacagaatgtaggcatcccccccccccccccagttgaaggttaaattggaggtctcacacaaatcacaggcatgggaattcaaacatcccgagttccgcgcaaacagcaaagaatcgctagacaacattcgaagaaaggcacccgcgccacgaaaacaaacccaacctagcgacgactcggtacccacacaacaaatcgatcttcttaaccagcagattgtggcgcaacagcagcagatccaacaactatcagaccaatatgcccggctcacggtggatcatcagctcatgctacaggaagtgatgcgagtgcagaagacggttttgaaccacgagaatgtcattcaccaggtgatgacctacttgctgtcggtggatgcgcgccagcgccgagatagcaaggccgtgcctttccaagcaaccggaacaacaatgagcccttcccaggttggtgcaatggatgatgaaccctcctcgcccctccagcaagcctcgaagctcctgaatgacatgaacgccgaactgcaattcaatatgaacggtgtcgactcgatgaacgatcctcaaaaggctgtcgtatcaactcccaccttggacccgaatgcgcgaaatggttcgctccgtcctgcgacagctgcaccaccaaacccagcactcgtttaccccaagatggccggcgatctggagcaagtggtgtatcccgtgggggccacaaacggcatcgatcccatgtatagcgagcatatcaacaatgttccgtacccaatgcccgccaagcaggagattgatacctcggatgctcgtcggcagttccccgacaaccggaagaagagcacgaacgtggatcctgggtgggtgcgcagcccacagatcctcttggttgaggacgatgccacttgtcggcagattggtggcaaattcctctactctttctcgtgtgtcattgatacagcggtacgttatcagtgttgtcccattggtcccattgaatagcacaagctaatattctcaatagtttgacggtttggaggctgtgaacaaaatccaaggtggctcaaaatacgatctaattctgatggacatcattatgcccaatttggacggtgtatccgcgtgtcatttgattcgccaatttgatcgcaccccgatcatcgccatgacctcgaacatccgaagcgacgacatccagctctatttccaacatggtaagacagacatcaaaaattgaatcaaggtcttccactaacccgttccaggaatggatgatgttcttccaaagccattcacccgcaaaagccttctcgatatgcttgagagacatttggatcatctcaagatttcgccacagaacccaggaatggagccagtccggccttccgctgctgctgtgactatggccgctgcaactcaaagttcagcaaaccagtcaattaaagaagacagctctcccggccaatcgcccgctggatcaatgaccaactggcaatcgcccggccagttccagaatatgcaggctgttccgccgaacatgcccgcagttcaagggccatatgttaccgctcaaccggccgcctacgctgttgaccagaatggcgtccagtacccagcaccaccagtaggagtcccaaccgcgggcgctcctatacgccccccgcaccgccgtcaaatctccgaaatgggcggtgccgataaccccaacatgccgaaacgacagcgcatgtactctcaacctcaacccatgcttgccgtgcaagctggccgacctggctaaaaaacgaagtcctgaccatttatcccttcatttttactcacctttccgcctgtccattgactcacgattcccacttgtctataacgaggttcgacttcgaaattccaaatcgtacattttgctactcttcgcggacgtcttgaatcgccgcagttgtctccccaccttttacaggttctggcgttgggtttgatttattttgggtggcgaactgtgtgcgattttatatacgtcagctatatccctcagctctatcccccgtgggttcatgcattcaccggagaggttgtttcgccaggtacatatttaccaacatattattttatttctctccattctatgtgcctatctcatcttgtaagggctgcgtatatgaatacattatggaacatcccaaggctactagtatttcgtagtagccctaattcctaagaatgcccagccagagactaccgggactgtatagtaattgacgtgaagcactggtacctacccccacatcccacctgtactgcagggggagaaagcaaaggggaaggtctagaccgaattccaaacgtctaaatctttaaatatttaaatagatcagactccttccaaggtccaggagggcccagaccttgcggggagttctgggcctttttggatcgttctggcgccacgtttgctgcttgtgttgtttgtctggtttgcattgcattctctatatactacattctcacacattcttgcaacgattatacaatacaggactggagtacctaggtacctagatacccattggagtcttttctcctagcaaatgatcatgattctttctaccaattagctcgccatatatccatgtcttatcattaatgatgagtcttgggtaaggtaacaaccactgctcctagacgcatattgaacatctgaagcgattcccactgtttcgaggtcccaccctacacaaatttctggtaaacacctgatgtctgtgatgtagtttcggacgtgagatctgtgagaaaaccccgataacggatctcaatgccacctgggcactttagttggttatcgtagaaccatccctaactagaaagtacaccagcaagtgctacacgacaatacctaggtgtcatgggagaggtaagagttggtcatgatcaaatgtcacctgcggatgatcctgcttgccctaaccgacagcaccgagcccatacttcccgaggtcagcccgatcagccttatctcgcgccatctttcatacaatctataatcatgttatagcggtcagaaggatagaaaagatacgtggtattccattggtgtccaccctgaagcaaaaccagagcttgttggaataatcgtaggccatgacatagcatgaaaccaccaggctgtagactctgttcaggaggcgcaagtataaatcatccggcattttgcattatgcatactccagcatggaggcgaggacatgactatagacttactcgatcttatggcaaaaatgaagtggatttcttggcttatacagaacgtgagttacacacctacaacatatagagatactaggtttgtacaaggaggcgcagatcaacagacgaacgtttggcaaggaatacgacggacagcgtcacctcgtcagtctatagttctatcccaaatgaatggaactaccaagcttgtgccattaataaaggactgtaggcattgcaaaagccttgcactgaaaattgatcgatatgatcttgtaggtcgttactcatgatgctagaatccaggataaaaccaaccgagaaaatcagaagaggaaagaacaatccttcttgaaaaaccaataaatcgcttatgctttcttctcggcgtccggcgcttgggatgaaccaccagtgggttcagactctgcgttacctgcttggggctctgtagaggcaccttcgttcttagtttcttccccttctttcggtttagtgtccgcaaggacaatgtcaccgtcattgtcgccagttggttccgccttttcctgtccttctatcggctgggtagtagtggtagcggctgcagccgagacatcagcggcaccgtccgcggcaagacgcatctcgacgcctttgccgtcttgcagacccatgtcttccacgccgaggacgatcggaccacgggcgtgagggacttcgtcagatggctctggtgaggtagtggcagccttttcatcggcttcagtggatgctatggttgtgttgaccggctcctcgggctgtgtaggtaaaggttcagtacctggggaaacgttagtgaacaggaaaccagtggctcgggaataatggatagaagtaccctcaactagcatgcctgcatctccattggtatcctcgccttcgaacgaggcattagttaaccacgggatcggggtaagtagcgcgccgcctagagattcatcgctcccaagaccctgggcaaactccggggccatgtataccccgctgccattgccaggaagcagcccgttcgtttgagcattcgtcacagccggtgtttggaatgggaaaatatcggcggagcttgtcactgagacaacgcgatcgacagcacgtaggtatgcgggtaatgttctatagtgcttggtcgggtagaggaccagctctgcgagtctctggatggtgtgtggaggtttatcctcgaagaatgatttaatcgacgagcggatggcgctcagaagaaatgcaagctggggcggaagccggtcatccgtgctcgcactagatggctggggctgtgagtctggcactcgttcactcgacgggggagagccagttcgcgctgcctggggagaagtctggatgtcggcgggggacgtgttttccttgttgctgctttcgggtgggatggaattcgcctgagatgaatgattgggaaacgagggctggccgatgggttcagggcgcacttgaggcatggggaacacattgtacacgatctggagctactggtcagataagtcggtgagaggcatcgaagtatagcgcacatattccagtcgctcaatcagaggcccagccatgccgttccatctccctctatatcagtatgttagcctcagaaggctttggggatcttggcatgatagtttcacgtacaaatccagcgggccgccattggcggctatttggagagcttcctcgtctgtaattttgatatcagcaaggcccatttcaactcggactgagactgcgactgtgatggtcaacctacccagagacattgtctagtcagctgtgcatggagaaagaaacagagggtcgaagctgcgacaagggcgcggcagtcgacatgtgtgattggcctgagcttatcgatagcgcacgtgactctccgcgaattttcggagttgaggggcaccgtcgatccctcgtttaccatatctcgatcaattgactcatttatcccttcgatccgacatcatgtggaactcgcctaaggtcggaatcctcggcggtggccaactgggccgcatgctcgtcgagtccgccaaccgattgaacattcaggccaatatcctagacgccgacaactctcccgccaagcagatcagttctcacgatggccatgtgaccggctccttcaaggagcctgacgccgtgcgcaaactggctgagtcttgcgacgtcatcactgccgagattgagcacgtcgacacctacgctcttgaggaagttgcgtcgaaggtacgggtggaacccagctggcaggctatccggacaatccagaacaagttcaaccaaaaggagcacctccgcaaatatggtatccctatggccgagcatcgggagctggtgaacaacacacccgaggaattggctcagattggagaggagctgggctaccctatgatgttgaagtcaaagactatggcatacgatggacgtggtgagtcatacatgatgcccagagcgtatacacttctgctaacagtatcaaaggaaacttccgcgtcaactccaaagaagatatccccgaggccctcgaggctctgaaggaccgcccgctctactccgaaaaatgggcttacttcaagatggttagtacctgcagttgaaacaccacatcatgcacatctctaatataacttgtgtacaggaactcgccgtcatggtcatcaaaaccaaggacgatgtcctctcctaccccaccgttgagaccgtccaagaggactcaatatgcaagctggtgtatgcgccagcccgcaacgtccccgattccatcaaccagcaagcgcaagctctcgcccgcaaagccgtctctgccttcgaaggcaaaggcgcttttggcgtggagatgttcctcctagaagacaacagtctcatgctctgcgagcttgcaagccgaatccacaactccggccactggaccatcgaaggatgcgcgctgtctcaattcgacagccacatccgcgcgatcctcgacctgcccatcccacccaagagccttgagcttctccagccctcaatcatgctcaacatcatcggcggcgcaacccccgactcccacctcaaggccactgaagcagccctctccatccccaacgcgagcatccacctctacagcaaaggcgctgcaaagcctggccgcaaaatgggccacgtcaccgtcaccgcggcgactatgcatgaagccgagaccatgattcagcccctcatcgatgtcgttgacaccatgcgcgcccagcgcacggatatcaagaccaaggctgccccatccggtccctccaagcccgccccctccgtcgccgtcatcatgggctccgacagcgacttgaagaccctcgtcccgggcctcaagctcttgcgtgactacttcggcatcgagcctgaggttgagatcacctctgctcaccgcacgcccgattacatggccgagtacgcgggccaggctgcttcgcgcggcatcaaggtgatcatcgctgccgccggtggcgctgcccaccttcccggcatggcagccgctcacactgccctccctgttatcggcgtgccggttaagggcagctcgctcgacggcgtcgatagtctgtacagcattgtgcagatgccgcgtggtacgttgttttccgtttcactcagcttcttatgcccccgatatatgtctaacattctgtgataggtgtccccgtcgccactgtcggcatcaacaacagcatcaacgctgctctcctggccgcgcgtgtgcttggctctttcgacccggctatccagcgcaaggtcgaggcatacgccgaggctgcccgtgctgagaacatggagttgaagggtaccaagttgcgcgagttggggtggcagaagtactttgatcagatgtagacagtaaatatgtaggcatctgtgatttgagatttgatacgagtttttaaacgaaagtggacgcagaaagaaaggagaaaccgtggggattctaccttcgctgagcttcttgtatagtggagttcagcttacttctttttatagacgacaatgaatgacttttaagcttattttatctcccgcgggtctggaatactctaaatgccttagattttggcccaagttcaattctatgaaacgatttaacgcagacaacggtggcattatgtattaggctaccgttaactaatactagtacaaagtgaaaaacaaacgtccgtagtacacaaggggaaatcatagcaaataaacaaaaagatcaaaaaagaaaagaaagtgacgttacacaaatatcataacgattttggccacattcagtttagacagtggttccgatgttgttgatggtagttccgttagtgacggtagtggcagggccgtcagggacgccgtcagcgccattagcaccgtcgccatgcttaatagcctcacccaatttctgggacttgccattgacgaaagctttgtcaacctcatcggagaatccacgggcctggtaatcggaggccttggtgccattgcccgaagcggcggctccggtggcgccagagacacccgcggcggaagcaactccggcggcacctgcaccggcggtgctggcgccgtggggcttgttggtgatgggtccaccggaggggatgccggtcgactcggatgcgttgccgacgctgaagatggggcactcccagcgctcgcccttggcagccagatcggcgtactcggtggccttggtggagacagcgccggggagctcgatgtcagggaagatggagtcgtggagggtcatcacggtctggaccttggtgtcacgcttggcagcgccctcggcctgcttggccttggcttgggtgcgggctcggatggcatcggcgtagcgagagaagatcgagggcgcgttctcggggtcttcgcgggcggcctcctgggcacgggtggcctcggtgtggatgtccctgacgaagaggtcgcccttcttgaaggcctcgcggacctggccctcgaccaccttctgcagggcaggcctgaccacgcggaacagcatgggtttgaaggtgttgaagagcagcttgtggctggacttcttcagcttgatgtccatgttgctgatggacacattcaccttatccagcttgaagtagttctccttgtcgttcttctgggcagtagaagcggcgagtttgacgctgagaccttctccgccgaggaagatgtccataacaccacgatcggtgatggcagggaagccctccttcttcttgatgtagtagctgatatcgcgcagatcaagctgaatgccagacatggaaatcataatcttgttgtcacgcttgttggtgatcttcttgcggccccagcggaagtagttgtcgctgccgaactccacgacgttgggcatcaggttgtcaccctcaaggaccaggttctcgaccacaacatcaaccatgggatccgagacctcaatacgggggactggaatgtagcggacattctcgaagatgctgggaatgatgacatcgcggagatcccgaaggagatccggcttgaaggtagccttgccactggcgtcccggccaagatccttgaacagcttctggcacgactcagcaagggcctggttttgcgggtcctgctcgaattggtcggccaagaacttgacctcgtcgacaatgcggtcggagtgaccgcggtaacgctcgcgcagaaggtaacggcccttatcgtaaagctcgttccactggcggctgcactcgtcctccatgatgaagccctgctcgcgcagagatttgctatgcctggtcagcttttattcttgggggagactttccaattcacataccgaatcaaggtgtcgacgttcttgaaccagtttcggagttcggggtccttctcagcatcacggtaaatagtgttcagcgactcgaagaagctgtccagcgaggtgtggttggcaaagcgttcgataagagtgcgcaagttctgctgaacagcctgaacattgtcgcccttcaggacgtcacgagcagagctaccgccctccttggagatgtccttagtgtgtccggcgtattgctcggccatggtcaacaaggtctcaacggcttgctggtctgcatgatttgttagtaatcttctccatcgatatagagattatgacttacagtcagcatgaccctggatctcgatgatcatcttcttcaggcgccagacggtctgctcgcgacgctccttgggaaccttctcggacaagtacttcttggtcttgtcggaatacgccttcttcttgtcctgtgctgagactccagtctcttcctcggcgaccgcagcgccagcggaagcagcgcctcccttctcctgatgttattgtcagcatttgtaaaattgagggcgtataaagatacatacgtccttgttcttcttgaatctggacttcaggtcatccttggagatattgggcttctcgtgccacacgttttcctctgcggcctggtcgatctgcgaaagctcctcttccgaagggcggacctggttggcggccttttgagaagcatcggcggcaatgtcttttccaagagtcatagcatcgttcactgtgcgttgttaggaaatgtccccgaccagtgaacaacggaagttaactcacgtagttttctaaactctccattggtgatcatgagtgtgcccagggtcttcagaccatcaacagccttgctagcatcttgctgaccggtctccttgtcgacggggaggccagggcgcttgccaccaaggttgtcgcctgaaatcttctgggcttgccagataaagtcctgcaggagctcaccctcgttcttaaccaagagcatcttcttagctgcgtcgacgacattgcgcagatctgccacaagggtctttccgtcggatgagagtgcattgggtggggatgtgagggcctttgagttcaaggcgctgttcaaagcgatgtcgcattgcttgttctgtggccgcgagagacctagttagcagttgtgtcaaggccggtggcgcagaagaggattgagacggaccgaaggaagcttgccattcttgaaggctatagcagggatagttagcacggcaatggtcaattggagggttgtgaagctcgacttaccatggtagataccaaagtattggagcttctggttgatatcctagaagggattccgtgtcagtggtggtcacaatggggtcgcaaacacacgtaccttctccttctgcttagaattggtggggacgttcacagacatgatgaagtatgtagcaaagaccaatgatgaagggatgagatagctaaagaggtattatgtatggactaaggacaagggttagagatccatggatgtttgcattgatgacaaacaagggacactcacggggattaactatatttattgaacctatgtaggcacaaaacaaggggtatcactggaatgaaggaaaatatgggaaggaaaattttaggtaggagggaatgacggaatataaaagacaggggatatagcgccattatgatgatccagacagagcaacaagcaatgatccctaccacaatgagggatccaaatgcccccagtctgttctctgttacctaaagaagagctcttttgcccatagctggtgatcgacacttgacgtcactctttcgtggaacgtctctttggccacgaacacggacatctgctccctcccagtctcgttgcacacttatttttgtcacagcctagaactttggaaactgtttttttttaaactaatatttgatttgctagctacttgggcacatatgtacctatgctgtgtcatatgtaaggtcatatcgatctccaccctgagtgcttcgtacgcacccagcaggtcctggtccacgtcatccactttaccatctccataaggttagtacattaccgagctagaggtacggagtacggagtacggagtacagccctggagcttcctaactaaaatcccataagactccccaagatctacaaaacttccaaggttgacgagatcgaggtcttggcacacgcgctccatcatcatccatgggtccatgtgggtccgatatcagactttgctcaacttgacgtcaacacttcgggtcttcgatacgacatagggaatagggggagacggtaattgcatttatgctactggctctcttagcgatgcgcaagttcctcgatctcgacgcgcttaacttgggagggggttacgattctcggtcaagcttcagccacaaaaaaaaagggggtgtggctttacggggctgtgcacccactccttactatattgagaatagcgtctccattctgtttccacactgtggttatctttatcttgctgatcgagttcgatcgattctggttcaccgatgtacagagtacctcgttgccagagtcacgcgggcgatcacatgaagcacagaagccaatcatcccagatcatccatggatatcccggacgccttctcttgaaacccgatcgtcggccactattttcttgggacactctactagtgcttgtgcacgatgccagaaagggaaagttttgggtatctctttttctcggcaattaaattcgttctgtgtccacaacgatatatgagctggcgctcgaacccttctcagatatgattcttcgagtgattgactttaccagaagctttcaatgcagtggaattatgaagtatgtggcgcttacagagcgattcatccacacgttcttcatcagcattaccagccgccaaccccaacaccaagctacaagacacacattatttcgacaacacctttagagccccatgaaaactactactaaccaccgagtaactccaatgttcacaagggcacagtccaaggcccactactaatccaccatacatatatcacaccaatgttgttacaaaccactccaaacagcgcatcagacatatctaacaagactaccatctcatcccccctacccccaataccgcctactatcctccacaaccctcctctcccacccctcctcaaccaacggcccaataacctccaccacactctgccccttctcaaaaaccctccgacaaggcaaatccagcgtcaaattctccggatccccagcaccaataacctcctgcaacgccttctccgaagccatatacaccaacctcccaatatgcgcccagtagatggcgcccgcgcacatcgcgcacggctcccaggtcgacacgagcgtgcaacgggccagatatgcccagtcgtagttgtccgcggcgttgcgcgcgagctcgctttccgcgtgtcgcacgtgcgagagggagtttgaggagagcagaattgtttcgttatccggggctaggaggattgccgcgaagggtcgctttttgtgtaggtcttgggcttgtgcttggtggacgagggctgcgtcgcatgccgcggtgagttgcggttgtgttaggggtgttagggttgggttgggggtggtcattgtgaggctttgtttgtattgtgggaccgcgtatggagtataggtgggtcgataggtgggtgaagatatctgagtgggttcagtgggtttgggggatcgtagactgttataatatcgtgctcggtttgatatcttgaggttctcggcggtctccgacgatgcgagatgacgggtgagccgggtactactttctcctcatttaggtgagacatttaacactcgactggtgatgaaacatgtgtatgtcgtgcattatataggtatctatttgctatgtacaaaaacattcaagaagtcgttactttatttacatgtggaatcgtcacgggtagtccgggttagtcgaactcggactcggggcagcggaggaattccttcttagcgggtcagtggacgagcccttggaggacacccgcgcacgagcgggggggccgtactctgggttctctgtatccggctgcgtgcgggcatgatgtaaagaaagatccacgaaatccgacaggtcggtcgcggccgaactgccgcccgtctcggtgatgtgcaccaatttgcccaggatcgcatattccagcttgagcttgacgctgtagaccattgccttgagggtgacatggatatcgaagaagcccgagtactgcactccgataatggcggcgtccatcagaatcatggccacgttcacgatcaggagttggaccagggtgcctcggtagtggcccctcgggcggagattcagtagtcgcacagactcccaggagtaaatgacggagagtatgatttcttgtatagagaatccgaccaattggacgcgttcgaagatattgaacccgtggatgaagagggaggatttgttcgaatggctgcctatctcgaggacgaagccgggggtatgtaggacgatggcgtcgacgatgatcatggcgagggtggcacggaggacggttcggctgtggcagacaagatgcaatcgagaccagaggactagggactggcccgttaccatcccgacccaagcgactagttccatcacgaaggggaacatgctggtgtatatgtcgaagatgataaggagatagccgaggccgaaggggatgatactgaaggaggcgatgaggagacaccagaaatagcacccgccatatcttttgaaggtgctgaagcacagcacgatcaattccaaggcattgtaccaggcaatgccgatcaggcaggcgattattgtacgctccgcgaatcggtcacggacggagcgatcagcgaggctgaaattgctgccggggatgtcggcaagcgacatgaggacatcgccgttgatggaagcggtattgcgatacaattatagaacacccatcgtaaaaccgaaatagggccaggataaggacatatatgtacaagcgaaagaagcctcctggaggaaggggatatatgaaatagcctcggggcgatacgaggcaaaacggcaggaggtggcggagaaaaccaaccgtggaaatgatagataaaccttctttagttgatatagattgatctccattggcttaactgaacaagaaaaccggggctttttcggggcaaccccaatagcgccgacgcgggcaaagttctaataggacgcctgcgccttaatcctggggttacctaggtacgcatcaaaggttattggacacatttcttcgtcacgatcagcatcggatacggggtaattatttaattataattatttgcgcattttagagatgaggagatggcttctcgttttctaggaaactgaaactccgagtttttcttatatcattaccatttccggttgataggttggagataagagacgggatccctcagggattatatttgctacatattaaggactgaacacggaatacggtgtagagataaacactagaggtacaaattctaccaagtctaccctgcattgtacatccctgccattacactactctgttttcggaagctgcttaaatgttagcgccaactagtgctataacggtgactttttctgctatcatgacacttgcttttatatagatttgtattacatatgtctactctgtagtgtgcccaggctttattcaatatacaattttatatgtgaattttaagaatcgcctctagccgggccctaactagcactagcaccaaatctctcctcaaccccttctgcctaacgtgcctggaaaagactgagaatattctcactatttatcgctgcgtaactttcgagagctatcgagacaagcccacgacacgccaagtcaacaagagtgtttcgatgataagatcaagctcttcactacgatcgaaccgttatcgagatcgcagccactggtccgcgcagcacgacggacccaaccactactactgagatgatgttcgcatggcatactcgcctcttcacaactgataactgggtggccgattgcatcagttggaccaactgctgagcacgctgacctgaagaaataccgatatatggggtttcgtggcgacataggggatttgggtctggcggatctacggccaacttgcgagagttttggcagcaaacagactgtgcatgagggttttagggaccattacgataaccggtctaatttgggatgcagcttccaccgcgttagccctctgccttcctactcgactcatacctacataggtatatacatgtagtacataagaatagttggccgctgatgcagccttttaatgtttgtttgggtagctcttcttctggtagtctttttggcagtcttttttgacgcagtcttggtattcccttggaaattttttaaaaaggatagattctcttccctttatcagtgctatgctatctagaaggataagaagaactaactacctacctaggtaggtatcacgatctgcatatgtcacgtactttcacatctaatctcatcatatgcacggatggtagatatcggtcaggatatttgaattaagcaaaagtggtcaaaagaatccattcccctagcagatcattctggagcaaagtagcgacatttaagcaaagtacggccatcctcatgactctttctcatcagtagaaccccgtccgaagattcgatatcgccgggactttggttttgaagggtttgaaggcttttggcactttaacggacaaaaataccaatttgccagcttgataaagtaagccgagcccgtgatcgggtatttaaccttggcttcgaaatctcttctgatcttctctttatcttcctctggaaactcgaagcctcgaaagccgatacagcactgacactctgtagtgcaatggcctctgcctttcttcctttgcaatagattcttctcttcttcacacctctgtgcgcagcatccacattcccggctgcaacatccacctcgatccgaacagtcttgtactagctcttctcgcatgaaccatttaggatcacgccttaggttatcataaaattttttgatgtatggtgtaagcatagatgtcgcttcgtaaagggcgtactcctttcttgcacattctacttgggcctctttaagctgttgatgtgtcttttcaagctcggtcctggtagactcgacactgttggtcttctcaggctggagtcgatcagactcgacagctaaggtcttgtctaaggccgtagctctatgatgtagcatttcctcacgctgcgacagttcgagcagagcgtgctcggcgagaagcacatcggtgatcctttcccggtagacactttctgatccgcatatgacatatttgcgatcacggaatgagtactgaaactgcatgatcgcgagtggaaagcttagcagaaaaagataagaaagccttggaaagtaccttaggaggaaacttgtaaaatatgagcatcagaactaggagaagattgaagaaagcatagaaagacgatcctcatttacaggtatccccgagtcatagtgtgatcaccctccgaaaatggactagttgcgtagaaggttttctaaaggttccttggaaagttgaagttgctgacttatataccatgcatccatggatggatacctaggtaggtatgtatgtgcctaggaaacgaggcagactggtctcggaaactagtgtacaaagaccagatatggcacacaaattgatcttgtgaacagtgatctgcaagggcttcttttcaacttggtactttttcgtgagatacctagggtaatataagagatatatatttatggatcgttagcaacttgtcttttgacaatgtgacaatgaatgaacgcagtctattcatttctttgttcctgatacgtagggcttaaagttttatcaatagctatcgacaagaaacaaaacaaaatgaaaaggtggttgttgatatatcgagccatgacttatcccatttaatatggtgtatgtagttgggcgatgagttctttaacgtagcccacgcccactgcccgtcccggtggtagatgtgatggagtctatagcgcatgagcatgcagtttccacaatggagagaagataaagatatgatcaggaccagaactggtagatgatgatgataatctgactagctgcaatggagctgtgtctttatagctccatatgaatgctagaaagagaaagatctagtaacaaacgctctataagcaaaggaatatcagtcacacattgcataaaggcaagagacaaacgttgcacataagcttcgctgtgactgcatcaagatgcaaattcgtttcctctatagtagcttaggtcaatgctatacgcaagtcctggccaccctcccctggtgaagagcgagtaaaaagggctctaccctaagctgactggtttgtacagacatatcgtctaggtattataagtgtcttcatcttcaattgtctacttagggttgcccgttatcgactaagggaatcggtctattacactctttgcatatttcgatggagtctatacaacaagactacaatggagtggaagaatgtgaccagggtcagaaatagaagatgatcatgatctctgctagctgccatagagctgcatctatatatgttgacactactgtgtagggccaagaaagcagagaggagagagttgtattggagaaagggaagcgagctcctacaattatctagactacgagggatcaatgtctggacccacgtgcatgcacaacaatataggttcatgggataaaataattaaaggcatacaaatccggtttgttcggtaaggacttccaaagtgatgtttcttcgttcaaaagcttttcttttgtttggcgttttggtccgacaacataacgtctcgatataagagttgggcagtacaacataatagaggaagaggaatccaattaataatgtcctcaataataatagccttggaaaaaaaccagaacaaagagcacagccgccaacaccagcaccagggtataagtaatattaaaaaaaaaaaaaaacaaccaaaaaaacaaattccaaaactccaaaacaaaactccaaacaaaactccaaagacaaaataccaaagacgaacaacaggccaaaattcagatcaggacgggccaaaacgtccagcaaggtccaacaagggccgaaaagggcaaaaataagccggcacgagccggcacaagccaacatggcaagcgccatgtatataataaaaaaaacagcaggggggacggcctgcgtgagaaaaaggatgagcgaatccaccatcccggccggttccggggtaggtggtagagacaacacaatcgaagatcttagtttttgcccttgagggcaccgacgacttcggccaatgcgttggccttcttggtcttcttcgcgagacggtgtccgcgtgggacagggacccaccggacgacaagaccattgcagtcgacgtcttcaagcctgccttccgctgccgcagtatcacacggctccacgaagacggggagaacggggcgggtgatgcgatcccccgccgcctcattgtcgtctgtgccagcgggctggggctcgggacgccccaaaatgcctggggatggaattcttggttagtatatatccttcccaacaccttccaaaaagtacatctggggtgtgctcaccggtaaaccccgcccaagtccattccccccaccgggtcctctgcccccttttcttctctattttttttgcggccttcacggcctttgggattttggcaacttgccggtcgaaatgatatatgagtttccattcagggtcagttttacggacccaaaaccttgacatacatatcattagcatgacggaccaatacgacagaacaaagcaggctgcacataccgaatggcacaaaaaagaaagactacaacaacaatcaggccgatgaggccataaccgccagcagccacgggagccacccaggcaggagtttcgttctgtgtgctattggttgccatttttgaattcacgacttatagacttacagacctacattacgcgcgcgtgcggggacggggctctacttatatacctacagacaggctcgtagatcacggccgtaacttgattaagtttgatgtgattctaagctgaaatcgttgatcctctcaattgtaggccgtttttcttcaatcttgagactttctcattacaagtatatactgtattttcaatatttcagttctaattgagataaaactcattacaggctgaaggatcagtgagagtaaattgaagctgttctgatcaaatagtcaagtttatactacaatgggataaatgaaccatggtagcctaggaattaagcgaattgtagaatcctggccaatcagaatttgaatattgtcgtgtttgatcctcgctgttcgactatgactggtgaggagatatttgacagccgaccttatttcaaccttatctctatagtagtgaggtctgtctagcttcaatctaggaaatgcacggaagatcaaggagtattcttttgtatacgtttgattacttttttattttattttagggtttttgcatgtcgttccttccatttcggtgccggtttccttgtctgcacttcgctgtcttggacactgagaaaggctcggaacccgaaatgctgcgagcacgatacagtgttatccacaaactgcatctatgccacccgcgatctagtccgacccacgacacacattcggaagaggttgcagccggatgtggttcttgcccggtagagctcacacggatgtcttccagtttgatattgtctttggcctagtaaggggtttgttgctaatgatgacaggaaccatgctctggctggtgagttgtgttcgcagggctctctacatgactcaggctttacccggttgggttggagtgacaggccatctacggaagcagatcatccacatgttattgcgaaagaccatgaaaaagaagacggtggtcttcaagcggattgatggtctgggtggatctacaatatccaaggtaagccttaactatatgtccaaggatgcaagctaacctagtccacttttactagcgctcatgattcaccacagcggccacatctcctctctcgaaaatgatctccgaccagagcagaaggacatatcccagcacagggagttcatgcccatcgccatgaactatcgactccgaccagatggcaaactgatcccgtgacagcaagcgcagcgtacgtacgaagaattccagaaacgagagatcaacagccggccatgtattgtggaggatgcgacacaccaattcatcatctattgcgggtatcaggagcatgatgatgttcggaatatctgtaatagggatacaggtctcttcgcgcagatgtgtagtagtcacttagaatagatgaatcaacttgacatgttctcagtcctcgcataatgttctaagcgcaaactgcgaaggggcagagcagccataacccaaatactctagctcgcagggttggtgttgctgtctgatttctgccttattatgtttgaattgagactagcagaaatgaattactcccgggctacggcagtgtatagccgtcagtgtgctataccatatttcgccagcagggcatttcacaaaattagtatatgtgtaactattttattaactgaaggatttagaaaatctatcaaaccaagatattcttgtatccctaaaactccaagtataatttctacaatttctacaatttctgggttaggcaggtttgccaccttccaagcttctgcgatatgcttagccggcttggccaaagtatgtgaggagtaaggaggacgcattagcagttcggcacttagtgtatcctcgacagacctcggtctattgtataattgtattttgttagcaactggtatcggatccgatacgctatagtaaaatgtctcaaccccccgtaatacggagaccccccgaataccacccgattcctgtatttcctggcaaatacgcccctatataactaccgacaaagtccaccagacaacagacgaggcccactgaaaacccattgtcgacttcaccagtcccctcctatccccagctcccccaacaacggccccataccccggaaatacggattacgaatcccccaggctgcggggtcaaaatggatcccctttatctgacattctccgctgtctccagtgatttcaacgtgccctgttatactgtatgatattctgcactatggcttcacccggtcatgccacccctggggcttcccacccaaaattcggctcggactacgctgagaaagagatcggtgacatcttccctgaaccggctgcacttctttcagagtcgcacaaatcatacttgcttgaacggcatggcaccctggatcttgacccgattcctagtatggatccagcggatccatacaactggccctcatggaaggtcagtgggaatggcacagtcttctgaattccaagctaatagcacggcagaaatcaaccaacttgggcctcgttgcgtttcatgcttgcatgggtacctttaccgcggcagctattatctgtgcctatgaagatatcgcggaagatttaggagtctctatccaacgagtcagctacttgacctctctacagatcgcaattctgggaggtgccccattattctggaaaccgctctctcaccgttttggaagacgtccaattttcctcctgtcgctggtactaagctgtgcttgtaatattggctgtgctaagagcacaaactacgcttccatggcggcatgtcgagctttggtttcattatttatctcgccggctatggcaatcggtagtgttgttgtcactgagacattcttcaaacatgagagagcgcgttacatgggtgtctggactctcatggtgactttgggtgtgccagttggtccgttcatttttggatttgtgactcaacgtgttggataccgctggatctactggatcttggccattgtgagtatccagccaagaaggctaaaagccacataactgatactatatccagaccaatgctgtcgagttcatcctctacattttcttcggacccgagacccgttatatcggtgccgacgtgcagtcccggtcatctgcgttcaagacacagtacttgtcccttcgacggatcgatccaaccccgttcaaggtgaccgagttctggcaccccctcacactattcacaaacatccccgttatgcttgcagcgattgcctactctatggtcttcctcttcgcctcagtcctgaattcggtcgaggttccccaactgctgcaaagcaagttcgagctcaacgcccagcaactcgggttgctgtttctcggcttgattatcggttctctattgggtgaacagttaggcgggttcatgtcagatatgtggatgaatactcgcgcgcggaggattggccgcaagcctgcaccagagttccgactctggctaagctatattggttttctattaactatcgctggtatggttgttttcttggtatgcactgagcaagctaccgcagggaaattggatgttaggccagtggttgggactggcgttgctgctttcggcaatcaggttgtgaccacggtgctcactacctatgcggtggatttgtatccccaggatgcgggcagtgttggggtgtttatcaactccgtacgctcgacatggggattcattggtcctttctggtaagttaacctggttgtcgattcttaaaagctataatgctgatggttattctaggttcacgtctatgttcgagagtgtcgggattgctaatagctctggcgtcgtcactgctttgattgtaggtgctagcttcattccgactatgcttttgcattggaagggcaatagatggcacgacaagaacaccgattcgttgggtctagggggaattgaaaagtgaagaacagcggagatgcagatacctaattaaatgtaaaaggattggactgcccagtgatgtgaagctgattttgaaaagaagcacaatcgacagaagattgactttgacgcatggctgctttctattgccttcaaaggccgtcccatataaccctcgtataaaggatagtcccaattggtttgttgggcaaagtagaaggaaacatgattccgggaacgagatgctaaccaatagatagacgagttcttagccgttgagttatgtgggaaaagcttgaagcttgccgagacaaccggaatacggggacatgcaggtgccagtgggtattgccgggagaaaacgcggggccccgcggggaagtgagcttggtcacatgttattgcacttccaaggttacacctttttcacaacatacatgtataatctatgtttgacgatagcagtagtatgggaggaactaaccatgtaaaaagatgtttccgaaaatactacccgaaaagaccgctaaaaagatatcttcgggccgcataagccaactggtattatattattgaccgccggctggctatatacaatgagggccagcactccctccctcccagccgtattgatatcataattaaaaaaaagtcccaaccacccatcccgtttgtaatgtataaaaaaagtcccgcccactcatcccatttcgtaattatacttcaattaaccactgccgttcccagtgccattgccattggccgcctggccgtccgcattgccattggcatcgccggccctattgttacctgacgtgcgggcccggctataccaaagaatcaatggttagtatgtcgtcagcatagatcctgccaagtgacataccgttcaatgtggaactgggcccaccaagaaaggaacaacgccacctgccttatcagcaggtagaacatggcgacgccgcccacttgaagggcaagcaacgggcccttcttagtggccacatggaggagctccttgcttcgggggtggattggcactgggaccaaaagaacgtgtcagaaagagcccaacttgaacagacgcttgaagagagttcaaacttacaggcagaggaaacggacaccaaaaactgttgacatacatgcagtatgtgtttgtgatctggcaaagccagaaggggaaagggagaaaagaaggaagagatggattctctggcagatggaagctagctaatatagctagcaaacagtgaggcctgacacctgagacaccaggcatcagcctggatgatataacaatcctacctgccttataagcaggtataacatggcaatgccgcccacttgtagggcaagcaatgggcccttctcactagcgacgttgaggagctccaggaggacggagtcatccttgctccgggggtggattggcactgggaccaaaagaacgtgtcagaaagagcccaacttaatagacgcttaaagagagttcagaaacggacaccaaaaactgttgacatacatgaagtatgtgtttgtctctctgtgcgcagactgagctctttggctctttaagtctttgtttgatgctttgtctcttcatcacctcacttcatcttctccatccttcacctacttcgtaacctcaacaaaaactgtaaaaaaataattaacagagtcattttgaggatatgtagttatgcttgaaaaacgatcgggatctcgatattcatgcatgaggagatccgtagcttcttagcgtcaagatccagccggaacccttcgtgacccatgagatccatgccgatcaggagcttggccttgagattgtcgaccaaatgggcctcgacacggatgcaggccacattctccgagccacggaaaaagacatcgaaggacacaaacgcggaggaaaggtgccgggatccgatgcctgctaccggaacaggggtacacttctgcaaaggcagatccaatgacttggctaagtcagcgtcgatgatcgtcataacccatcccgtgcttaagcctaagcctaagccacttccgcgcgcattgatttcctgcataacagtatggtggatactgctagagagccagagagactgtgtatgccatttcttgccgtttgggtctcggattcttggccaaggtatgcttttgttgatcaggtgatgaagattgtaaccttgaagaaccttttcaacctggtcaatccagttgccgagatcggctcgctctttgagagggggagtgagcttgtagaggttgaagcttcctaactcaggtaggtcaaccgattgattggcgacgacagtggtttgcaacgctttccaatcattgctgtcatcgtcaaggtgcgctgcatcagcagctgcagagaaggaagaaagccgcgcagcgccagcagaggaagaggaggggtcagccattgtagctgacacaaagtgataaagatcaagataaaatgatgtgaacacagttcaaagatactgtataccacgatggagataattctctaggaaaagagactccgtttttggtgctcaaaggcaaattcacacagcggtgacgggttcacacagtcggtgaattgtaatccgggtacactcagcggtgtctcgggttctcgctcagcggcgattgtaatccggttccgcacagcggcgatgaagaaaaggtgagatatagcttctccgagaagtgagagatagctattctccaatgaaagcttagttcttgatgaaactagcgaaggggatagaggaaaaagggcctcataacctgttgaggctacgaaggaggtgaaagaaagatggagaggaagtgagagaggtgatgatgaatctatggaaggagctgcccaggtggtatataaaccagctgtatgactaagatacaaagagccaaagagctcggtctgcacacagagagacaaacacatacataccctatatgcagtgcatgtcaacaatctcgacatcccacttccagtgtcgggggatcctcaggcctccgcgtatgagtccgagggaggtgaaacaacctatgtgcatttgttaatgaatcagaggaccattcctctcgggcgcagtattacagagtgcggggagagggatgacggatggtgtgagctgcagacgttcgtcaaggttcagaaggaaaacattgcaaaggcgaagtatgatgagagttgtttcggcgactattcgatcccggcgtacggggacatcacgacgggtgcaatctgaagctatgtccgttaccacatctcgtgactgggagtcgtacagtcactgtcttcattacagtgtagaagctatggacagatgctactcgcacttccgactcattaagttgttccaacttttaaattacttaggttaaattcagccgcatgcacaaatttgaatcagtcattataagaatgtttaaccgctctgtatcgaataatcaagaaatttgtacatgaatgtaataaattgttgtgtttatgtgccgagcgggaagcaaggtgagatttgatgatggacccacgcaagcaatcctattcaaccagtcatacaactacctgtaaatattttacaggttctgggcgacggtggtgaggatggcaccgacgggggtggcaacggtggggagaccgaggccagtgacaaggccaacgacggagggagacagcttgatgaggaggtgcttgccgtccttggcgacgatgtggaggaggtcctcaacggggccggagacgtccttgacaaggtcaccgacggaagaggcctcatggacaatggagccaacggggccggcgatggtagtgagaccgagaccggcaacgagggaggtgacggagggggagagctcgacgagaaggttcttggtgttcgcgccggtgacttcgagggtgttcttaaccttaggagcaacgtcatggacgagctcgccacgcttgaggttcttgccgagagtagcaacaacggtgccgacggggacaccaacgttggggagaccaaggccggaaacgaggccagtaacctcaggggagaggctgatgaggagagcaccgacgtcagcaccgacaacagtgacgagaccgtcaacgacggggccaaggccggtgacgagaccaccaaggccggaggcggaggcgacaatagaaccgaggggaacgccgaggccagggagaccaaggccggagacgagggcggtaacctcaggggagagctgaatgagcagggtagtggcgtcagggccagcaacggtcaggatgttgtcgagctggggtccgaggttctggacgaggtgaccgtcctggacagcgggggtgccgctggcagagggggaggcgggggcgggaaggttcaggaccttggtcacgtcgctgagcttagagacaacggggagctcgttaagcttgagctccttggtaaggtcaccaatcttgagatccttggtgatgcctccaacattgagatccttggtgatgtcgccagccttaaggccgctgaggaggctatcaacaccggtagcgggggtgggagcagcgaaagcagagccggccagagcggcgacggcagcgatgaaagaggccttcattgtgaaattaatgggtatatagaaacttaaaagagtgactgcagttttgctcaaagaatgactgtggtaagaagcttgggagaagaagaaaaccttgatgagaatggagagaaagactgtatttatacactgcggaccgaagggacgaccttcttgcctgcccctgtcccgtgttcaggatttttccagcttgtcaaaagggcagtatcctcgactggcgggtcaggccgccccatagttggcgtgatttcaatatgatcaatataatggagtctaagagagatattaagtgggactagcatcccaattatgccgagatggaccgaatcggctaggatggggtcagcatagggtcctgcctagatggggactattaccaggatgggaagccagaaacaatcaaaatttgatcaaatatatgggacatattattgtcgaacccttgtggctgaggcttatccgtacctacataggtaacagtatagttccctgaattcagccctagagataggattttcacatatcgaatccttaaatcctattaaactctcattactccgtacatcgactcaaatcgtagaattcttgaaatcggaatgtcaatccgggagagtaccggataagccaaattaagatctgcatgctcgtgtttacttgggtagactacggagtaggtagggctcatggatccagggttcccaaggttatgcatccttccagggttagattgggctagcgtgagcttatactcgagggcttatggttcccccgaggagctccgggaattaaccatacaatttgtttttggggtgcaggaaatgagatctgctactgctggataaacatacaatattcaatttggaatatatccaatacatctacagagtactccgtacggagtacggacagtcaaccttagaaacaaaatgatattcagtccactttaataaataggggatatatgtcataacaccattattatttgccctgttttctttttctctctgacgtcattttaatggaaattagagtggggaacctccagagacaaagaatgatctgcagagggaattagactgaaagagctactccatagtagtaagttggctctaaatccaatagcgcggaactatattgccaatcagccggcataactaccgcttcctccatttaaccaacgtcccttattggccgacagtgtcaacgccatataaacttcgaccccctttccgttgtaaacgccccaagtccccaggccacgttctcgataaaatgatgaagatgaatttccattggctgatcggaattgaaaacaaacgcgatggtgaaatttaacttggctggatatttccagccttggaaggttaccttcgaagtccaacatcagtcagccaccaccaggacgtgggacccaagatcgtgttgccaaaagcttgggtgccacctacatgacccgaaagggtattttactttttttcttcgttttgtttatttccctactggggtttgcgggaagccgcctattgttgggacaatgactcgacctacttcagcatataagtttgatcgctggagatatccagaacatgtgagagcactgatcgcggaaataatccggaggattttgacagcaggcacttgcatgatgcaccgaaggttctattcgtatatccggtgggccctgtcgatcaccggatggacttcacaatatcctgttcaatatcctgttaatattatctcggactagaccggcaatcccttatagccaagaggactatcactatcttaaatttcctcatcatagggcgatgtcatgtcgtgattcattggtttttagacctattgctgtcttaatatcggatacctccaaactataggggttccaaggttacctgccaaattgtgagaaaatgatgcaatagctcaaatatcatccttctatttatcccaaggttcgattgtccggagacagcatgctagtttcctcaaattcaaagcgatattaaaaaccatgtttcatatacatccatggatagctgatactgcaaatggtttcgtaatggaaagttcgatagctggtttgtaaacatttgggtgtcgatctgccccgaacttcaccgacccggtctcgatctggttttatggccatccactacggagtatgtgcggagtatatctatccaccctcaacagaggacattctgggcctatccactctgtctacaaggagtagttcatcggagcgggactggtaggcctgcaccaagctcacatccacaagcaaataaatggttgggtctagcagctctaggttaaatccacaatagagccttggagctcattcgtagctgaaatggccagccgctttccttggtttgcttgcagaagatggtaaccaaggtcctccgtactccacacaagacatgaatcagtctttatgttgtgtcttccgcaataaaccggtttatgttatatgttgtagaagtttttgttctgttcactagtaatatggcgtttaaacggcttggatatattttgccgcatcaccatcagcatcaagtcatcttatctcatttctggcaaatacttcgtggaactgatttattccacaacaatgactaaaactaaaggtcttggaacctcaaaatgattgctagtatgcttaatccaaccaggctatggcaaataatgctagaatgtggaccagctgtatgggactatctcgggttattggctcagctcgccacggtaacatcgtattcccggaacaaacaaaagacggaggttaaattgggtctcatttctcctgtatgggtactccgtactccgtactctacgttgtgttttgccacagtcgtgataatggggtagaggcaaatattgccataaaatgcaatagatcccttcaagagccccacgaggagccgcaaacttggaatatgctcatagtgctatttccttagggcatatttgataagagcacttggcacgggtggaagagctgtgagttgactgggccatgatgagcaatccgtgaagcccagttttgactgcaggcgaacggctaacttaacgatcgacatatgatcattttatgttgtatagtccccctagttagagttcaaagggctggcatcattcctatagtgcaaaattagttaatgatggaaaatcattgcaacccagccctagttgtcgagatattgggtgacgaaaatggtgacttgcgatgctattgtttataccctatttccggggtctttcaggactcaagctgcgttcgttgatttgtctgggaaggcaccagcacgttttgctccgacgacgtcgtgacaaaaagaatgccatgttttgcatagatcatcccgcacatcttttcgggaagaacaagtggaggatgacttgaggatgatcgatcttgatcgaagattgcgagcaaagtctataacccaatgtagaacttgctctgctgcctcaccggtgccatattccttatcatctcacatcgagtcagattagcccaaaaactatgtggtgacgaaattgttcgaaagccactgtatgcatacgcattttcgtctttgcgctgccatcgccgtgtcaacaatcgggtgcagcagatgggttttcaagattccccgaacgcgatgcaggctgaattatgcgcttgggcacgccgtagcctcgtgatcgcattggaaacgagcgttaaaactgcgatttgtcactgaagcacactaatagcggtgaagttttgatttggatcggagatcgaatgttggtatgtgttatccttgcaagtatgcacgtagacgttgtacaactgtacaccgtgctacagctcgaagaaatatccagccaagtgcgagtagtacgcaccctccattcgatggattaattcgcagtatatattattcattatgcacagcatgtggaggggtatttcacaaaaggggaatcacgctcatttcttttccaaattcatacagatattacaaaaatgacttcacagcccgatatggtaccccgagtatgcatcgccggccagcggcatccctgacaacgggtcttgagaatacatctgattcgacatatagcccatcgagccatccatcagagttttctctatggaggcagactcaacctcgaattgctctagatgcccatgcatgtcccacttcctatcacaatatttgagcaaatcgcgaatataggacagacagcggatggcacgtgcgtggcaattgaacaagtcctcggcgcccagaactggtggctccggagtcccagcggggacagaaggaggtgccggtacagcggcgctaatgagtttgtcgtaattgtcggataggacatcgacaaataatcggcccacttggtgcacgcgctgcatgtccaggtatgtgaggaaggggagggcgctggggtttcctaggacctggtgaatttggctgatgtagtccatgcaccggtcgaataggagagctttgttgtagtcatggagtgttggatatcggtgcgaaggggataacaggatgataatggtgtataataattccagtcgatatagaagtgaaaagtggtggggagcattattgggacattgatggaaccactcccgggcacgccagcacagagtccagacgaggaccaggggttgcggggatgggtcacgtccactgtaatgcatttcttggtagcccgcggacagaatctgacggattttaacgatatgcaaggcaggtgccggactgcgtaggaaaatgtgactttgctctatgggtgcgcctggtgcggcaattgatggcaatgcgacattcacagatccatcggagaatgagtacgttctctgcatagcgggactcaatcctctgtaacaagattagcagggcggcaattgaggaacagaacaaaaaccaacctatctagacaatagatgcaatgaaacacacgccggcgaatatcaagtcggtcaggattagtcgaaacttcagcaggggggtcttgatgcaagcccagatcgatcgcaaccttgacagccattccaaccaaataccagctgcggaagcgtatcgggtcaaccaaggaatattgagcaagcagtagaattgcttgtattcccgagattgacccgggtcggagaacttcctcggcgtatgtcaaagcatctgacacgagagcccatgccctctgatgacttctatcattgtaatggtatgatactgacgccgaagcaatagcaagaaccatgcgcagcatccaatggtcgaacggtttggcgaagcggccacctgactgatatacggcatctaccgaggtccagaagctcgtttcgacaaagaaaggcagctggacaaaaacattatcgaaatagtgttggagcaacggggtcgcttcgtgccgcgcgggtagtgaataaggagaggatggtggggaagaatcggctagagcgactgagaggagaaggttggcgaaggaggtattcgaggtgatgccgtgaaagtctcgcgatgtcgcattgacggaccttttgagatgttagcggggccaagggaaaaaaaaagcaatttagtcatactaacaagaaaccaaaatcgcccactaaatcatcaatgtccgaaacctctctacggtgggcaggacccaatgcactttcagacgagacggaggtgatcgacatctcccgagggatgccatcaccctcagcagacagtgaggttgatcgggcacgcatctgactgatcttcttctccagcttctcacaatatccttccagtgacgcgacataactcctttcttttcccttggcgaattcatcgcttgccccggagcaagtggtcgccttgccgaccctttcgcaagccgaacatgcggggagcttgccgtcgcatttgatcttcgcagtccgacatctcgagcaggcagcgactggccgactcaccttgagcaggggattatccaagaaggtcgtggctgtgacggacatatctgctcattatactgatcatatacggtcagtaaattcgaggatatgtgaccccccactctttcttccccctgcatctccacttcgaagaccaaaacggtaaaaagcactcacgtgatgtgaaataaatatgttttaacaaaagcaaatggacgtgcatgagtcccagggagggaaaggattagcgactaatgtaaagaaataagccttgtagacgttgaaaaagaaggagcaactccaccgaagtccagtggtctttttttaaacacgaaacagcccctggagattattataggacagtgaattggaggggggaaagggagatcggtggaaccgcacggacttttggcgagaatctccccgtctctaaattgttgtgatgtcgatgtctctattaagatgcctattaaaacttaggatatcactattaaatagctaacaaaacactattagaccaatattatatactactagacagttttcaaccatttctatgtatattattcatttaagaccaaggtctctcatttcagctgccttgtgcctccacatatccaccctcaccttgtcccacgcccaaccttttctccagatctggaccgaggccccctctcttggaaatcacattatggccccattcccattccagacacttcttcctcatttcatatccccttaggccctgggagcaccatgtcgactgttcgcaattttgatcttcgaaaggtacatcgggtataaatccccatgtgattggacctttcttttccttttatcatattcctagataccctttgtggcccaccatgaccccgagtcccgactcctcaacagggttgaaatcgccggaattacactccctagagccaccggatggtcgcattgctcacacattaacagcctgcacaaggtgtagacaggtatgacgcgacgcccctctccgcctcctccccgcgatctcgggtttttcgcccctctgtcccttagcgtcatgagcttctttttccttgtttcgcagtactgtttcaaaactgacccacctcccgtgtagcgaaagtccagatgtgaccccggcattccacgatgtgcgccctgcgaacgaagcaatgccaagtgcgtgtattatgactcgggccgagacaaaactgtacctcgaacctatatcgtatcgctcagagagagagcccgagcgttagaaagagagcttgccgaagctgagaacgagatacaacatgctgccgatgccgagttgatggtgcggggcgccgggcgcatccggtttaaggagaatgatgagccgcgatatctcggtgcctcgagtggcatcgccatgactcgtttggtcatggagatggccaagcaaaataccgactccaaaagtatcaaggatgttgtccccgaattcaccgcacaagagatcaaagatgcgttcgccgaagaagactcgaaaccgacatccaaagtctatcccatgataagctcgatcccgcaacccaacctacctccaaaggccctgacctataaattgattgatcttttcgtggccaaaggtactgcgatcactttttattcggacctttttctttttctttttacttcttgtagctagtgtgactgattcgttgtatagcacaagcgctacttcctaccctgcacgagcccacatttcggcaagaagttgaggaggtgttcaatggctcaacagatccctgcaaaaatttccaactgcggatggtcatcgccatcagcatgcagaagatgagtacagaatatgctggtctcgctgatagctattatcttgcggccttgccctacctggaacctacgctgaaacgattggacttgggggctctacaatgccttgtgctcattgcctcatattcaatggtaacgcccactcgcacagctgcgtactgggtcgtggggacggctgccaaactttgtcaagatttgggattgaccgaagaagccactgtcaccaaatcaccatgtgggaaaccactgaatccgttggagatcgacatgcggagaaggttattttggatcgtctcgtcaatggagttcggtctttcccatagtctgggtcgatgcagcagctactgcgtcagccacgaccatatcaatgtgaaattctttgaactagtggatgaccggtacatcactgccgaaggcatcacccctggagcgaagcccgttctagcaaagtgtattgcggttcactttttcaaaatgcgactactccaattggagcccagaagaatgctctactctaacagacgagagaccccagttgatgaccaggacccatggttttctcaaatgttggccaaaattgaccattggatggccactactcccaagaacgacgatggcagtgggctgaatgtgaaatggttcgtcaattattctcattttccgaagtgcggctttgctgacaataacttctgcaggttccaagggagacggaacaccatcattgttctcatgtatcgtccctcaccacaaatccccgagccaacagtcaatgccgccaaaatctgttacgacgcggccatctccaatatcgctatgcataaggaacagatgatcaccggatctgtcgacctcacatgggtgtttgtgcaagctctcttcatggctttaaatactgtgctctggaccctctcataccccgaaattcgaaaagagcataccattgaggaagttcaagggcacctggatatggcccttgaagtgattgtattttccgccgagcgttggccaggtgttcaatctgccttccttctttacaggcgccttgttgctgcgtgcttgaaagcgtacaggaccgaagaatcgtttgtcgtacactcgccttctaatcatccaacaccaacctcctcgcagggcatgacccctccagcgatgtccagcccatcaggcagtacgcctgcctcatatcattctaacaatcaccgtggcggtaacctatcaatcggcgataccgcctcaaacggtacctactccagaggacaatcggctgatcctacattcactcaagaaccaaccccacctgcagtggcccctggagcgtccaaagaacccccaatgcaatcggtttcctctgcatttggcatgcagccaccacttacagcccagagtgtggcaccacattatacgtcagaaacctacgtgggaccgacgctctatcctgatatatcaatcgacccaaacaccccttataacacgataccttcggttgtgcccggcctgcaaggctgggaccccaatttctcacttgcctcaacaaccgcgggtcatttggcatacaccgatgcgaccgtcgatcccatgaactggtccaccattggagaccagtactctcaatactttaatgagccattcccggtaccctcatggcgtgaacgcaccctcagccaacaagagcaaatcgagcttctggcttccctcgaacacaatatacccgatgtatccgcccaactggttaatgagtataatgcttactatcagtcctgagattctgatgcaattggtctcactccgtctgcggagatcattttgtattgaggagcttacttgggagttgtgctttattcctggtatatatcactcatattctgtctgggactggctcatctcctgacatccacgaaatatgcgttctgtaatggtcttgttaccaaccaggctggaggtcgcccatgccgaaaaaggcatcttagaccacctgactttgttttctcggcgaatagtctttcaatagtaagagataccatgttccattgtttcaattctcatttaacatctttttctttcatgacttggagggttgggataataatggacgcaggtaagacccgggatctgccaccctagcatctcaagagtgccgcataatctgatttacatattgtagatatattaatgtaacgaatattttaacaattacaattattggggaatttagtcccggcaaatatatctaaaagtcccttttaataaagttttggtcttgttgttctcgccactcaccaggaggatgattgtttgcagtcttcaattgacgcatttctattgtcgcattgtattgagatgaaagagataaataagagaatagcaatggatagacgagtacatggatgcatacttcatgaatcaaccttggaatagaatatacaatgcaggtaataaagtacatcgggccaagaccggtcacgtgaattgatcaattcgccgtcatcctcgtcggctttgaccacaggattgtctccatcaccaccctccttcaccacagccactcatcagccacccaatctgcaccacttgtagggattcattctagtcccttggaatgcagatgatctagtcggcctattgaatgacctgctcacctgcttgagcgaccgtcgatcgagaccgggacccccctctccagacattggtatcaaactttgcgattcggatccagagccgctctggttaataccgtctctgcatgctgaacttttcctcgggctctcatgtctgatcgcactcaccccgcatcctttcaagcaagacctccttcaccttcctcgcccgccgggtctctgaaagagaaccatcggttacccatttcttcggaacacattccccagaccccgacatcccctccgttgatgtcggtgagcgaacaaagtcatgccgccaacttcatatcctcgcatacatcaccgaatcaggcgacggtccaacctccgaatatctcctcccctccgtcctctgctccgatgtctacccaagtctcccaacagcccacaatgagcaccaaaaattcattccccactccggccagtagtgtcagcggtcaccctgtgaatgcgacttcggaggatgtggaccaagggagaaaatctttcaatatcgggatacaggactcggcagaaaactcgggagcaggtgccgctcagcaaccagcacaacaacaaacacaacacagaccgaccgaccacgatcggcagtctttgcaaacagaccgcactaacgattttgccgccgggcaaggtcagcactcaacagaccccgacgctatggatgtagatacagacccgactcgccgggcaaataccctcagtctcgatctggactctcttcagaaagagctaacctcggcttttcatctttgcaagagatgtaagattccccaaaatgcatcaaggtgtttgttgcatgcagctgcataaatgcactgaccttgcacattcttggaactgaagttgttaacactgcttttttactccttgacagctccgatcgttactggtccagacccttcagtggatctcgtttctctctatgggttaggtccaatcgcgaactcggtagcacgcacagatcccgtgacaggggagaaaatcaaccgcctgaggaaatcatacgaaggaaagctgaaaggactgggactcgctggacggaataagccccacaagcaggagattggcgcacctggcagtctgaggcacatgactctatggcccgaagaggaatggcagaaccagaaggtgcatggcaaggctatcaaggttgcagacatggattcggcgctacaaaatcttcaatcgcgagccatgcaaatggaaccaggaccgattcctaacaatgatttctgggaagatatcctgggtcacgaaaaagcggccaagaatccatctcaggcgagactggcaagaaggctgccgcagctccaagtgccggtcgctcctctactcaatcctatgccgcaactccacaagcgcaggaagcggagcggccgcggcctagcaggggtcgcaagagacattacgatgataatagctttgccggctatggcgaagggtttgtggatgatgatgatgaccccggattctactcgaacggcgagggaactgggaagaagaaacgcaagaaggtattgcattcccacggtaaccttctctgttgatataaattaatctaaccaggaccacgttgctaaggtgtcaacccccatgtccgaaagaagcgctagctatggggtcggcatgttcggcattggggcgagatgacgaaatgggttttatgatcatttcgaatcaaccaaaagctgtttctgtttatttcttttcgatgaaacaccaattctgcccatattaacctaggggtgatggggtgatggctcaacccgggtcttgctacctactgtgcaaggcacgggaacttgatgcctcgttccctcccccttgatctctttttattcattctcagtacatgttgcattacggtgctggatatacccggcttcatcaatcggacggcgttttttgggcgggagacaaagttatccaaagtggatatgatcaattgcttttatttcgtaagctttgtttcttccccttgtttttcttttttttttttccttctttttttctttttcatctttctacatctcgcgcacagctattcgagatctgcactgctctaatggttggttattctgattttcttgacggggatcatatgcttgcagcttgtttccatgattcgtctatcgggttggtccgctgtgttcatcaatgattatagggagtgtgcatgacacttccttacaattttttttttttaaaacatgagtctttgcagccttgaccttggcagcgtggagatatcattccgcgatgacgagacgagaatgaaattgattcaatagacgacaagatgcttcattgtaaggtagaactattcggaatatgtagttggcctgtagttgatatatctcactccaaatagcttctttttcactggagtatattaggccaaacgagcacataggtataaaagagcccaacgcagatgaagtcaagcggtcaggttgagcatcaaatatgctatcaaggccgataccaaaatcaatatgtaccattacgacgatcccaagcagatcccccctcccatagctgatcccgatcgccaatcacgcggcgtgtccgcttgaactctcggaccacgaggaacctgaacgttgctgtttcatgattcttcccgattggctgcgtttgcggcttcctggccgagtgggcgttgggttttggatttcttcatagggacctctgtcggggtattctgtctgtgaatagcttcattttttgactccgtttttgactccgtttttgactccgttagcagaaatatcgctgtgccgacagtatgtcactgcctaacacggtcactttgaatcagctgaaatgtagcccggatcaggcgatatcaaagaagaggagattatctctgttctttctaccggtatcacactatcacatgtcacgtcacctatcatgccgcatgccggggtattgtggggtatgaacttctcagctcagctgcacccttctgacctcgtccaattggaagatacggaatatcctggctcatttcgatgtcactaaagctacgccgtgatcgtggaccattcagaggcttgctatttcaataatcatgtggcatgtggcacgaaggaagcgatctcctagctcatgcactcgtggcacttgtgacgagtcctcctgtcccactattgataagtgaacgtggttcgcgattatattctgagagattctcagctcaattactctctagagtacagacactatgccttcgcctattcctcagccccaggggcttccaattcttggaaacatctttgacatgatcccgggcaatacttgggcttcgttaaataagctggcggcggaacatggtggtgctggtatcttcaaaatcaaaatcctcaccaagcaacttatcttcattacaaacgccgctctcctcgaggaagtctgtgatgagaaacgattccgcaaatgtgtcaccagtcctattgtcgagatccgcagtctcgcccacgacagtctctttaccgcgtttgacaacgaggaaagctggggcatcgcgcaccgtatcatggctccttacgttttgcccgaggccatcaaggaaatgcacagggatatgcaactcacaacagacgacttaatctggaaatggacttcaacggacagcaccaggcagcgtatagacgtcgttaatgatttggaccgactcaaccacgccgccaacatgaaatgcttcttcagtcagcacgtagactgtatccttggcgaagaaccctccgtcatcaaagctatggcagacacaacctttgaagccgtacgtcgccccacgcgacctaagctcctcactcggctcttgtaccagagtgcattcgacaaggacatcaagacttgtcgcgactactgtgctcagatgatcgccaagcgacgtaacgatcctatagaacagagagatttgctgtacgccctgcttcacgaaaaggaccctaagaccggacaatcccttccagacagccgggtcatcgacgagataatcaacattctcatcggcagtgccacaaccccgaacctcgtgtcctttaccctgtactatctcgcaaaaaacccagacgcggtcacccgtgcccgtgaggagattgatgccctcatcggtccctccggccagatcgaacacttccatctatcgcaattaccctactgcgaagccatcctccgggaatcattccgtctctgcgccccagctccgggtttcaatatcgagcctttgccaacagacggtccggtcctgctcggtggaggagaatacgagattcccaagacccagcccatgattgcaatcctggccgctgtcaaccgtgatcctgctatatttgatgaccccaatgctttcaagcccgagcgcatgctcggcgaggcctttgatcgacttcccagcggtgtgaagaagggattcggaaacgggaagcgtgagtgttatggtaagcggtatgcttgggaatggtcgttgcatgcactcgttcgcatcattaaggatgttgattttgagctggcggataaggagtatacatttgatatggaagggaagaatttcaatggcgcctttactgtcaagccatacggcatgtttgcaaggactaagaagagaaacgctgttgcttagtttggatatatgagattgatatcatgtgttgaaattctgttttgaatattccggaatatgttgatgccaggttctgcttttatgactcctgctgggaacttactttcgagattaataaagccgacaatgatgctaattttgcttactggattttcactccctgtatgacattcctagacattggagaccagctcaaccataatgtaaccaaagctcctcacacagcagtcccatcggtctgcttttcgcttttagaccataatcgtttcaccaaagctctgatggagctttttgctccaccgatctcatagagcggcctgtgttcctcattgacatcatgcatgtaatcataatcgacatgcacaaaggctcgctcgacatctgcaagaccttccaatttacgctgcaacgcttggcttacatcgtgagactcccgaagcttagtctcagggtccatgacgatatcaacctcgacatagagttgctgcccggaatgataagcgcgacactatgtaccgttagccaagatgccaataaccaatccaccttcacaacttaccgtatccaccttctgaatcctctggtcgtgagtcaaagtcacatagatacacttattcacaaattcccgcggagcacatttgcccacaatcaaccacatattctcaaaagcagtcgacgcccacgagaacaagataagcagcgcaatacagcacgcacccacgggatccagataccaaacaaatcgatcaccaacaaccgacatgaccaacccaaacccattaacagccagatcattacggtgatcaatgtaaaagacatgagcagccggataccgacgcaagccataacagtagatgcacatacataacttggagaagatagcaatccccacacaaatcagcggcacgatatgcagctgctcagactcagtcttgccagccgcaagagccttggccgattcaatgatcagctccactgcgacgatggtcatcaacgcacagaacatgatgactcccattgtttcgacgcggcgtcgtccgacggggtacttgtatggctttggacgcgaggacatgcgtgacgtgacgagcataacgagcgacgagacgaggtccatgaaggcgtctgcggctgtggcgaagagagctagagagcccgtggtgacggctgcgtagagttgaatcacgaagaggaagaagttgactgtgaagctggcgcgcacggcgagctttactttgccgccgttttgggcttcgtcttcggctttgaggcgctcttcttcgctcgcgccgaggaagcactcgatcatctcgttctggtctttgtagaagcatgtaagcttttgcttttcattggaagagtagacccagttcttttttggttcggatatagttgttttgtattggttgaggtttagagggtcgtcgagggccattttgggtggtttgattggggttggtcaatggtagctcagtgtaagactctgatggtacaatatagggctcaagacggagatcagataagacaaaaaatcttcctgcgatctaaggtttcagggttagctaggactccgtccctgggtacgccaagacacccggtgtctcgaacatcttcagcgtcttggcactgtggctgcctgcgaagtttctcttggcttactattgctgacgagtcagagcatgagggataagcgccactaaactagcgaggtcttgggaatcttgggatttctccggtggatgactggaaactcgagtttccaattccgtaaggacctgagtactcatgtcggtagtttatatgcctccagttttgccgacagcatagctttatattcaatctagaaacagcgataatggattactactccatatagggcctgcagtatctgcagtaccctattaacttttgtgtggacgggatattgtccgacttttcatcgccttggcatatctcagacatgcatatttctccgaatatatatccacattttatcacctattaaaagtcacgtagaatagctggagatgtatgtttcaaggcaaacgagaatacttacaccatatatctaaagcatctatcttgccttctacctaggtagggtccatgtcactaagcttttgaagtaccaaggtaccaaattcgcgaaccaagaactataaataagatcgaacagccccaatcacgagaattgaccagcgtggatttcacttcgaaatatctttctataaatacttagcatttttagagcttcagcgaaaggaagtgacttgggtcaatttcaccctgtatgtgacatctagcaaaatccagctattgtcactgaccatcctctgtagtaataggacttctcttgcatagtaccatacaagtctagcctacaccaaaccactatcttacctcatgcttcatgatctcatatactagccagtagtatcttcaacagtcatatccaagtcatatctatacagtaaactttatttccctgaacctgcttcaactcgtaagcagggggaaaccgtaagtcaccgggataccctgatgagttttccgattggtgccataaggctgtccacgtcagaaccaagtaatatcattccacgccgctatgccttcctgattcaagactctccttgatcagaccttttcaagtatcaagtgacgtaggatagctagaggaggtacaccgagctggctctcaaaatcaaggaagaaaaggaaatgcaattcagttccctataaggtctatggaggtctcttccttacagcgtttccccagagacaagtccctgcacaagggcgagtcgatctaacgcgaatcaataatcaagggaatccatacagaggctatagctacgaatcccaaggctaaacttaggcaactgaggaaacgatccccgtggccaaaggtgaggggacggagctatgagagctacaagcattcctgaagcatccgagctcaccaaggcctcggaagctcaccttccaatcgccatctgtaagcaggcatgttgacaggcgtatcacatccagactcttggatcagagcaaactaaggaatattgtccggtgatcggatcatttgacttccctccctacattcctactccttagctacagctgtaacctcgcgcggagagctcgggtcctggacaaacgtgaggaatgttggggcgggattatcattcggagctttttttaccaattaatctttagtgtttaaatatacgagcttgacagctcggagttgtaggttcggaaaaatactccacgagtttcactgccttcccagcacatcgccaaatatggcctccaaggtcttacagaacaacaccaacagcaactggatgaaagatccagggctgcggagactaaacctggggatcgggtttatgctatctgcatcagccacagctggatattgtgccagcatgatcaatggccttctggtgcttcccgaatgtaagcatcttgtcttatatatctatatgggaacacaaggctaaacaaaacaaaaccagtctcaactttcttggaaggactcgacgcaaatgagagaggccttattatcgcagctgtctcgctggggtccttttgcgcgttcatccctggatcttacatcgccgacaatctggggcggaggatctgtgttctcatcggttcctccctagtgatcattgcctcgattattcaaatctctacacaagatcactgggtcttctttggtgctcgtgttctggctggaatgggagttggcatttcacaaactgctgcaccattgctcattactgaatcatctcatccacgccagcgacagaccttcacaggtctatacaacgctctttggttcatcgggtcaattacctcggccactattggttttgctggactcacgattgcagggagttggtcatggaaactcccctgcttgacgcaggtgttttatccagtccttcaattgataggactttgctttgtctccgagagccccagatggctggtctctcggggaaggaaagaggatggaatggctatactggcgagataccacgccaacggggatgtaaacgacgaacttgttcaggacgaattctaccagatttgcaagagcatcaatgcggaggccgacaagagctgccgccgctggagcagtttcttcgcgacccggagcaacatgcatcgcctatccatttgcgtgattctggggttcatgcaagaatggtctggaaatggtatgagggaaaaaaatcctccttttcttgcaatccgattttctaaccaagtttctggttacaggcgtggtttcttactatctagcaccgattctagaatcagtcggtatatataacgcatctcaccaagctgccatcaatataagcatgcaggtgtggaacctgtgcttcgcggttggtggagcaatggcagcagaccgatacggtcgacggaaactctggctaagcgcaacaatgctgatgttcatctatctatctgccgcaacaactatgtccggtctcttccaagagctacatgtgctagaggccggcattgcggtggttcccatgcttttcctcttttgcagcgcttacgatatggcatatatgcctttgtttattgcatacccagctgaaatcctgcccttccagctccgcgccaagggtcttgccatcacactgaccaccgactcgatggcttgcttcttcaaccagttcataaacccggtcgccttggatgcaatccactggaagtacttcacggtgtatctgggttgtcttgtgattttcatggcgacgatctacttccttctcccggagactaaaggcctatccctggaggaagtggcacgcatctttgaaaaggagaagccttaccaggtggagacaccctcggatgtttcgcaagagctgcttgtgttcccgaaaaagagcagcacctcatcgtgattgtgatctaatttttgttgctgctgcgtgttgtaattacgacagtgcccggtccagaaacagttccccgcaggctaatccccagcaggtcggatactgatgttatgtaggtgtctttgttcaaagtctatgtgcaagagcaaatcctatagatagatatgtagagattatccaccattgtcttgtggtgtcaatttgaattggatgttctaatagaagagatataacggccataatcgataattagccatcggtgttgttgctttgtgaagttaacgtttgtgtagttgtacgatgtacgatacatccggatgtccatcaggtcaatgggtccctcgatgtatacaaatccatccaccaattagaagcgtccagttacgactcacactaagccacatctgaactagcgtccattcttatccaaaacccgcatatcaatcgactcagacagctctcaagcgcaaacaagtcaaattgattccaagcctaaactcttctcgccaggccacaccactcaaaacagacaacctacctcattttccgcatccaacctcacaagaatgaccaaattcgagacagccctcgagcgcatcgacgcagcgcacgccgacgatccccgccaaacccaaacagccaccggtccaatcccatacgaactgcactatgcgcaaaaaatgaccagctacctctcaaccctgaacccctccgcaccggagctccttcagctcgcaatccgcgcccaacacctgcgccgttgggaagtgccgcgggacagctaccccgccacaaagatcgggtatcactcgtggcgggcgggcctgcagaggcgacaggctgcgctggtcgagcagatctgtgttgagagcgggtattcggctgaggaggcggcgagagttggcgctttggtgcgcaaggcggatcttaagcagggagatcctgatacgcagactctggaggatgttgcttgtcttgtctttttggatgatcagtttgataagtttgaggcggagctcgcagatgaggagaagatggttgatattttgaggaagacctgggcgaagatgtcggagcgggggagggaggaggctttggagattcagttgtcggataaggcgaagaagttggttgggattgcgttgagtgggtgatcctttgtctcatatatccatatacctaaggtaaccagtaccagagccttcatatttgaaatcatgtaacttgatattgtcaatgtggatgaattacgcttcgttaaatgtgtatacagctttttatagctccccgaaacgcccgctgatagacccatggccgagtcaaaccggaatgaaaaacagtaggagtagagagaaagcaaaactcctactgctgcaatgccgtgagcgcttaatgcaacgtgaaaatcatcagtaccatgaccatcgggctaatcaagtactgcccatgtcgatgaatcgaaccaatccaatcgccgcgccagcagcgacacctccgacacagcacatctgcactccaccccagatcgcagccatcacattggcacggccagaccagcctcgcacaacgcaggtcttaacatacccaaacacaagcagggtaatcgccataacaccaatactccagtacagcgcagccataatctgcgagacaatgaaatacggaataagcggaataaacccgccaataaaataccccagcgcgagagtgatggccgaagtccacgcctggttacagtcaggcgccgtctcacgatgatggaaagcaatcaggaactcaagcaggcggtcttgagatgcatgcaggtcacgcgtgatttctgcaaccgccgagtccgagagcccgtacggggaaaaggtttcgcacaccatagcgcgagtctcttgtgagtctgtttggattaactgttgtgtttcacggactgttgtttgatatgattcactggaattcgttagtacatatgaatgattgcttgccatgtgtggatgacttacgcttcactctttgcgccgacgtatccaccaagtcccatggatatggctcctgctgccagctcggccagtccacccagcacaaccacttttgtgtttccgagtgcggatagaccggcgctcagggcgaagggcactgtcagcccgtctgagaggccgagaatggcatctgagacgatacgcgggttgatgcgcacgcgagtgctggagttgctggtggtggttgatgttgattcgtccgggctgttgcaccgtccgaaggtgtcataggagcgggtgctttgggactcgaggtcttgatcggagtctccgcggatggtatcgtcgtcgtcaatgcgggtgaggaggcgcttgcctggagttgaattgttgtaagtatatgccactctgtgtgtatcctctttccatttacttacctgatcgtattgtgtccgcatcttttgtagggaaaagcttctgcttaatgaagaggaatgccatgatgctgatccggaaaactgctaccaaggtacgatgtacagcagaagttcaccacgcaattacaagtcggtaagagggagaggacaagatgatgaaggctggctgggaagtaattgcactttatttaatccagcaaaggatccgtatgcgtgtcttagtctttgacggatatcaacaatggctatgaagcgaagtatgaagagaagaaaaaaaaggaatcatctacaacaattggccgcgtctcaccccttttaaaatccagtcccacggactctgaccagtttcagtaatcaacccaggcgccatagaaaaaaaaaatcgacaaaagcccacagataatgcaagtcaaacaggaaataatggaggtttagtcgccaaagaggggccctggaccaatcaccgggctctcaaatgtcagcattgacagtcaattgaaggtctaggagcagcaaggaatgagctttgtccactttggtgagaaaatggcgacaagtcacttcaaatccaactgatacgattggtgaagtatgttgtgctgacctttgcctgtgatgtgattggctgcaaacggcgacccgcattccagtgggtccgttgaagatctgtagatccactaggctatttaatggattctcattggctggctatattattcaagagctcggaacggtcgcggctttcccattttgacattcacctggtccgattgttaattccgaagtacgaaatatacagccttgaacagagggatctttttacactcttggcccgactattcagatacacgagaagctggagtttgttatctccgaggattagctgaagaaaagaacgactatccctaggattctaaatctgttcggaattacccttttcagaaagtacagtggatggacgcctatcccaacccgacactcctcagttaaacatcattacacagtctttatgaattgtttgttactatgtgaggattaggttgcacggacaaacacaaacatcaaagataataggaacaaagcgtaggcgacgtatcatacagccacagttgtctttccctaaaccctcggagacctatcggaataccattggtttatagtgcctagatagtgttggagttagtaagttactgcatcttcaatttcagaatgtacatctttcttcttgcacatatgacatcatgtaagacatcgggaataatatctcggttgttccgtgaggccagtcctgctgaacacctggttgtaccagagacggtcgaatatgtagcttgaattacataccaaggtttactcagcaatatgtaagatatgggcctattgcaatcgtcgcctagggcaaagcctggatatcttgaataggtacattttggttcaattacaatgtcaatgcacttggtgcacagttatcggccttccgcacgctcaaccagctgatcctccaatcccattggctcccatatctccttggccttcttattttgcacccacaccacatctccttggacaaaagccacgactccacccttgcccgtggcactagccgtaatgcggaacaggggctggccgttttgtggatgggcctcacgcaagggtagcatgataagtccctgctccaaacaccagccctccaggatatccttgaacgcaacttcttctacgaccggtgccttaacccgaggttcaggggcagccgcagcggcagttgcagcggctgccgccaccttatcttcccgagtaggaagcggcgcccgtgccgtggttgggcgcgggagttcggcagcagcacggtcacccagctgtaaggcaaggtccatagtttgcaagcccttgttccattcatcatcgacgatggtaagctcattgacctcctccggtatctgagcgcgccaccaagagaaccaagttccaacctcctcgtagttggggtcgttggtgagccagatgtagagaatctcgtgccacttcgggaagaaatcagagactagcaatagtcccatgacgttaggctggaagaataccttccagcataagacatctttgagcgccgtgagatcttgatcctgcgggttcacggtgaagtcctcgcggagatggcgagcaaggcgcggcagcaggtgattgcgtaggcatacgtcaaattcggatcctagggcatcccgccagatctcaacgcggtcgaccaggcccttgcgcagactccatgtatcgagtaccgagcggaactttctcttcgcgtcagacatgagaccagcgggctgtttcgggtttgtgtgccgttcatccaagtattggagccaagtgaaaagccaccaggggaactttccatcctgttcagagccgggatgtcgtcgactaactcgaggtttccaattcttcagggccaggcccactttgggaacgaccaattggtcgagaacgtttgcatacacaaatggcggtacaatcgccttccaggccacgaccagcgcggttgccttggatggatcgtagacgtcccaatcattcaggagtgctgagcgcactcgtgggagccagagggtatagatcatcgtttcgtaaggtgaggtggatgcccgtttccggggctcttctaacccgttcgtgcgagacagaagaggctgaagacgagtgaggttggacacgaggaaagtggggtcttgcagaggctcccattcctccatggcctggcggaataacggatgtagagccgcgactgcggtctcagggagtcgatgctcatcaacagcatctcgatatttggattccaaatcttcaagcttgtcggttaactcattgaatttggtcgcgatgctttcgtcgttttcaaagatgtccagttcttccactgcggcgattaggcccgtgagatggttgatccgggattgatatgcatccaattcgtccaccacctgagcttcttcgagttcaatgtactgttttctctcctttaatcccttccactcatccgcaaatgcttccaggtcattccgagctcgctgggtaatctttaacgcttctccttcctcttggctgacgaattgttgtgtcgacatcaggccggcagtcgaagtaagaacacgctgctcttttccggtggcatcgacgagtgatttgagaacattaggaacttccagtccttccatatcatcttcaatttcacgcgctgtgcggaatttgggcttcgcacgctggatcggtgtacctgtggcgctccgaccctgtgccttgcgctcctccttcttctttcgtcgccgctgccgttcttcctcggagctgtcttcgaggatttcgcccctctgtgcagctgctcgtcgctcttcttcgcgagtctttttcgacttctcgctcactgcgcccaagcctgcaccctgaggacgcgcctgtacctcaatcggattgacgataccttggccagtagttccgagaccttgtccttccctgtagcccatctttgccatcatgcgcgcggcaaaactgttggctcctccccctctaccgccacctcccatagctttcccacctcgtgacgatcctccacctcgagagttggccatggtgtttcggttgttgtgggttccgctacctagtccacccatagtgggaggggtcacggagcgagaggcagctctggcgaacccacggaagccagtggtcgggcgcgcgtcttcttcatcggagctcatgtcagcgaccttgcgcttttggccagaaaacgaaggcgactccatctcttcaggggttcattggcagatagtggccaaatcaactgtcccctcagttttcagcgaaagagtaaaactgaggaagtagtgtcatgtgaaataatgagtctcagtcaagagctcatgaaattcacgtggggaccggagcggaacaacctatctccgaaccaacgaaaacaagatgacgtttaggtcggttacttcatagctcccctgccacttttttcccctttggattcattcatctcacaattgacaccttctttattctttttcaccacatattagtcctcaacatatacatccacaatggctgctcttcttagcaactcggctcgcgttgcccttcgctcaggagcttcggctacctccaaggccggagctgcgggcttgacctttgcccgcggcaaggccaccctccccgacctttcctgtaagtaggggtgtttcagtaccgcttggagcttagagaaactgtacctacaagtttggagtaaagtcatttagactaacatctaaaacaagacgactatggcgcccttgagccctccatctccggcaagattatggaggttcaccacaagaaccaccacaacacctacgtgaccagctacaacaacacccttgagcagctgcaggaggcccaggctaagggcgacatcgctactcagatcgctctgaagcccgctgtcaacttccacggcggtggccacctcaaccacactctcttctgggagaaccttgcccccaagagtgccggcggtggtgagcccccttccggtgctctgtccaaggccattgactccacctacggtagtctcggcgagttccagtccaagatgaacgctgctctcgctggcatccagggcagtggctgggcttggctcgtgaaggacaagcagaccggacagatcggcatccgcacctatgctgtaagttacgatcggcgactcgcctttgatatgaaccgttctagttactaactccttaccagaaccaggaccccgtcgtcggccagttccagcctctgctcggtattgacgcttgggagcacgcctactagtaagaattcctgtttggatagtcatttgcctatactaaccatttctctagcctccaataccagaaccgcaaggccgagtacttctccgccatctgggatgtcatcaactggaagaccgtcgagaagcgcttcacttaaataactttggaacgctatttgctttgtaaatgctgctatgatatgcgcttaatctcccctgtattgtagcatgtgttttgaatattatcaatgatctggtactataagattttatcttatttagctatgtcttgttcctatcgaatgtcaaccaatctcgtagtccgggccgggcggaccgcgtaatgcggaagatcaccgcaagcatccgaaacacaagaccccgatattctccaactgggcctcgaacacttgcatttattggcaactccattatgtcggcagaaagtcctggccagaagaatggcttcaagtcatttttttccaacgcattgcgtcccaagaaatcccgccaaacccttcgcaagggcagcagatcgacaacagacctgcgactggccgcgcgctccagtatcgaggaagcccctccaatgccagagctggctccgttgcacgcccatagactcaaatacagggaattgcatgcgcaagtggactcacaactgggtgagcgaagggactacacggaaattatccatacgctaggcgcattggatctcaacgatgtcagctctccaacccacgagcaaaatgatcgccgaccccccggcgagggcgatatagcaagtctcccgccaaagctatgggcgcaaatagcaggttatttgaatcccgccgaagcagcaagcctagcaatggccagcatcacattataccgacgactaggcccaagatacctcatggctctagaccacccagacaaccacacgcacaaaatcaacttcctctccaatctggacatctccctcccgcaccacctcctctgcttcccctgcgtacaataccaccgacgcacacaagaaggaaccgaacgtatccgcccaagccacgtcctaaacccgcttttcaactgcccaaactcaagaaacgccctgaaacccccaccccgccaccgcataacccacggccgcaacctacccttcgcattcgtgcaactagccatgcgcgctcaccgcttcggccccacctacgggctggccccagacgcgctcggacgacgctggcagcgtgacgactggtcgcatacatcgcgcttccacatccacgaaggcaggctcctaatgcgcgttaccagccagacctttgcggcaccggctctcacgccgtccgcgcagcgcatgctgctgtactcgcgcgaagactactgtccgtacttcagtgtgtgcgcgcactggcgggacggcgagctcatgccggcgtgtaagtgtgcgctggaacatattccgcggccgcggagtagtggtgggttgcaggcactcgagcaccgggtaaaggaccggattgcgggacaggcgtttgatccgaatgcgctgacaacgctgtgtgggttctgtcggccgatgcggaggtgtcctgagtgtccgactgagtatctgatcgaggtcaagctgagtgaggatctggtagatcgtaggttcaagcaatctattgtgattacgcggtggagtgatcttggggatgggactacgccggatgggattgagtggggggctattaatgggaagagagatgattatgattctttcgcgcattacgctaagcgtgggattgcgagtatcttcgaggcggcttttacggcggatacgcttcctgggcagcgggttgtttcgctgaatccgaagaaaaagaagcttggggaggaggggaataaatggtattaggccttgggctgggatctattggaaagggcatctgtttctgcttcgacttactgtatacatatcatgtcttttgggcgttttggaagaaaaaaaagactggagttgggaacaaaactggaagacttggagtttggagttacctgaatttgattctgatattctgatattctgcattcgaatgatattgcaacctgttctttgcttcaaatagcctatccaggactaacagacatgcgtaggatctatagtaactctcgaggtcaaatgcagacatccgtttgtttatgatgaggttaggcaccctcttccacccagcatgtgctccatccacactcgccttcgctacattgaagccatccgtcccaactcgacattgagtaagacaacacatccattgacgcctctgctgcctggctcttcaggtggttgcaatataccttctctgcttctcctttctctacttcctctcctggtctacgtctattatcacatcaacccaacttacccaacttacccaactcgtacttgcgatatccatcacaatgtccgctcctcaaattcccagcgctgggaacaatgactaccctgaccctggccccaaccctggccccaaatttggcactagcacttccactgtgactagtaccggtactgactcgacacacaagaacagctacggcagctactggaggggatatagcatcaacccgccccgacactgggcgtaagttccgaagtcatcccaccacccacattgatcctggctaatggatatcctatatcagacaatccaaaaaacggatttgtgactgcgaaaaccacaaccaggaggagtggcctttcgactttgccgagctggtacgtatcccaaacacccttccagagtctgtaacccttctcgagaatgtttgctaacaccgattgcatctagataatcgctccctgcgcatgcaagtgtcccttctgcaatgattttaacaaggccctaaagacaaaacatatggcctcgaacctccgtcgacacatcacgaagacgcacattgtaagactccgatacccctgcttgatgacttcttgctaatacctactaggaaggaaaccctgacttctatggtactcttgttgtcgcccctggagggatgaagtaagcctgcaagcgaaggctgcaaatgattcacccttctaagtgatccgtctccatacagcgataagaacgatcggttccacccgcaggatcggggctatgggccagggaggatcatccaagacacgatgaagatatgaagtggagggagaacaggtttgtgctcattacggtactatcaattagtcaacttgtgtgataacacaatacaggcctgcattgggataacttcagatcgtatgtcacgtttggtaagtcattactctgtaacatagcatactagacgatgttacacatttcagatcaaccctgccagcagggtcgacgtcaaagattgacaaaatgcataggcccggccattattcgcatgcatgaagaaaggaaaacatgaaatgaggtggagcgagctcataactcacatatggagtgaaaaataaatgcaaaaatcaatgtagccatgctactgtacatgcagggccgggtatcatatggtacaaaacgaagaaaagaaagaagcgggaggcagcagagacgtaagaaaacagagaacgaggtgtgaggccgtaatgactggcttatagaagctcagccccttcgagcacgacggcccatataccgaggccgtcttgaatgttcatcagaatggacagccatctcggaatggggtctaacgtgggcctccatagagtccggtgtctcggcacgcgggatcccaaggccatgactagtttcgtaggctagacgcgagggagcgcggttctctttcggcgcggagtcaatgaacttctccacaccgggaacagacacggaatcagaacgtttacccttcatccagccaaagatgccaagtgagctgcgccgcttgtgttccatgccgtgggatgtggaggggcgtcctgagactgttgcggagccggggtggtcggcaagtgttgacattgtcaaagattgcgggaatcctcgtggtctgaaaccatggggcggctctccattgtggattggggggttggaagagtataggtcagttggggcggtgattatttgagacatgggtctttgagaggcgccgcccattgttctggttttggggattactggagacggggcgccctcttcgtcgtcttcaaattcgtctggaactggggagccttgtacacgacgggggttgttgcttgaccggttgaagaatggaggtatgaaactaaggcgtcgacggggctcagggttggcttcaggtttaggctttgactggccgaggtcgagaggttgttccaagatgtccagggtggtcatgtcaagagttgggataccagggacttcgggctcacttggatccgaagcgatgctgctgtcgtcatggagagaagctggcctgacggcagtgcgtgctggcagctctggctgttgaatttcctggtggatctcaaggggcttgggcttgcaacaccgtggaccctgctttgcagcggcaacccagtcttgaggtgtgagtggcgatggagagtcgcggtcattagtgttcgcctccggagtcatagccttggttgggctacggacgcgtttaattgttggggttgatgcttcgttgggctttgcgtgatacagatctccaaaggtctcgatagcagggttgttggggcttccgggcccaagaagcgcgctggctttggaggaaacagtgttgaaggagggtaagatagtgcgcgactcgtcagaggtgacccctaggcgtggagtatcactgcagttggtttgcatgctgtcatcaacctcactgccatcaaagctggagcgactggccatctcttccgccgaacgtgggcggttaacccgcctaccagagaaaaacaaatcctgttcagtctgtgggctcttgcgggctttaatgctcccattcgacccattcgaccggtttgcaccggtagcatatgccgtactcatagtgtcaggagtgggagggagcctgacgcctccgaaaagagaggaatccagtcgtccacgtccgcgcggcttgggagcatacaagtcagttgtaaaactggggatgctagccttggtagcatcagatgatgatcggttcctgcgtctcgtgattatggtctggtttatgtcttcgcgggactgcatccaccgatcaatttggtctttcttgctttcttcccgcccagtggggggaacatagctatccaagctgcctgtcgatgacgatctccgaacagggagctcgagctggtcaaattcttgccacctcgtaggcgtgtcgaacggattcagctcactgcattcactcagaacgcttaatctgggtgactcaggttccataacctcggtagtcgtgtggaagctttctgatttcgtaagttcagtctttgcagtgcgtgactgggtttcttcttcgggggtataaaggcttcgcaaagtggcagtacttttgttgtccgcccgtaggaaggagggtgctttcgaaagtttgcgtagctcggaagatgtctggcgctgagctacactcaagacacttgaatttcgcttagaagaggttctctctgggatgtcaaccatggcccgggatttcgctgctaaggcctcggacccatcggcggtcatagggcgggacatggacagcctggaggcccggccgccattctccaacatgtcaatcttcgattccaactggcagatgagctcgacggcttcggtaacagccatatctcgcttgtcaaggtcgatgcgtagttgctcgttggattcacgtaggatctggttgtccttctcggtggttcgaagctcctccacttctgctatcaactcatccatgtgcgctagttgttcttccatctcagccatccgctccagcttcttttcatagatagccatctgttgtgtgcggtggaagacctcgagcttcaaatcgaaattgagcttgttcattttcgagacatacttcaaacgagtcagctagtcagctagtccatatggggttcccgtgcttatggctcacttggtccatttcccgcatgcccatctcttttggctttctctgaccagcagagaaaacatcactcgctttgcgtgctttttcagacgcagtatcttcctgggttcgggtggtctctggagtctgaggagcattttctttgaattcgtctgatatggttcctcgggagcttcggtgtgcgcgttcttctttgagtagatcctgcaaaagagccgaggcagggtttactagtgtaggggtgccgggttcgggggtttctgagccacaaacaatcagtcactagtgctctagatccatccgatatcgctggtaatcggaagacataccagatgagcggattggggtctttgtgcccgagtgaataggtgactgatctctcagccatgagacctctgcattcattcgaggcggagtaaacatattcgcacggcccttaacacgggacagtgatgggtgctgaggacgttctgacgagtcttgaagaagcaatgtcagttttaatcacttaaccctgagttttggcactcaattcaagcaggtgcgagtccaaatatcacgtactggaggagtggtctttagaggaaacgatgcgtttgggtgcagtgttgggatgatatacggggccttgagagtgtgaaggagcgggctgaccagcagccgagctccttctttgagttttcccatccataatggctgccggcataatgtttaccgaatgcgcataattgacgtgctgcaagaagcccccggtttcccagtttggacgcagctgtgcagtatcctggtcaatcagtggataccacggtaacaatttcctgcacaatccaccagccgcatcggagattaatggatggatccagggatatcaatgtcgattggatggtggtggttaacacgcaggcgcgatgcgagggatgcagatgtgttgcagacggggagcaatcagaggcgggttcggtcgaacctgtggagtgcaaggtaggtttgtacagtcaatagacccgaatcaaggcacagaaggggattccctccaaacctaagactcaagggagaagggacactgggacaagtcaaacgaagcgagggcgatgtcgcaaacgaattgtgatgagtcgccaaaaatgaaaaagaaaagggtgcagtcacagccccactttgtagatgttatttgttttgagccttggaagtagggacagttgccatgagagaggtaaggaatggaagaatcgaagaatgggagaaccgaaaatcaacagccttgcaaagattcaaagacgttacttctactccgtactccgtacgtacttttcttcttcctttttttccagcccccccgaggctagattcaataggctccttagccacgacgatcaattcgctattagcgttaagtcgctctttttcctcgacaccaatcggatcggggccgtggggtctggcccttacgcggggtttctcctgagtgttaagtgttagatcctggctttataattgttacagaattcttgtttcgattagaagtaggatgaggaataaatattctaatattatatggatctaatcaattccagtattctataacagagaaaatcaatggatagaaccttggaaatcgcatacaaactgttttgatatatcaacattccatttccatggatccagatcttatgtctccacctgggaattgtaaagacgtcagatctgacatattcgtttatacctaggtaacatcctaacatcctccatctctcatattcttcattaaattgtagtccaatagggattccatttactccgtatagaagaacaaaataaactcagaccaggctaaaatcctgtcctacctcacacgcaacctatcggaatggaagaatcatattgtcgcataaaatgtatcataaccttcatgagcgagcgcagctcagagcccatgagaaatgcctcgtcacaaactattactcgcgtattacttacgtttcgcctctccagtccagatccgcatgtccttggcccgatcatgagcaacgcggaacactatcgaaccatctctgttagtgacctcatcctccacccacatatccgaaacagggacatgacctacattgccgctcagtctcatccagcccacgaaggaaatcaaccccgccaccgaccgcaccacgcgagttgtgcgcatgatcagcgatatctgccgctcgtttcttgaatgcctgacagcttgttagtcccagctcggcctatgaggtgctttaaccagccgcggggatcggagccacctacatctccgagaacatcgaccatctcttcttcctcgaagagttcgaggatccgctcgcttaggttgtagaaatgcggtgccaaagcgcgtaagtcaagcgtgcgcggatctgccttcagggcattcattacccgctccgaaagcgcttcgggcatgtcgagcgtaactagacgggacgttccgagacgcgctctataacaaccacatatagcgcgttaggaaagtaaggaacttcgtgtctagtcctctgagtaggctggactgggtgggaccttacccgatcgagagcatttcacctagccatagtggaagatcgatccgggttccggctttgatctgtgtatgggtcagtaagttgtgtggccggatagtgaaaagcgtggcgtaaactcacatcttcgcccgcattgccctctaagataccgagtccgggtacttcgagctcgaatgtacaaggcagtttctggatccaacgatgttagcaattgttcatttctgagggttggtgtttaggggtatatgttcgcaatagacccacctgtgcatcagtcaagatggagtcaatatcatagtaagacatggtggcacgtcggaatattcatgttctgttgttcgcaaagttgtgagactgaggcgcgtcgataacggcgcgcggtcacgtgttacccgcgcaatgggaaattggtggagaaaccgaggcatctactacaactgccagaaggtatggtctttggtaactatgagacatttactacgacctggcagatgggggaaatagctcgatcgcccaggtccgtaatgtggcacttccgactcattacatgactccagatatgtgcctctacaacatacgactcacacccgccattacacaaaccacttttttttctagcagtcgcagaaagccgatataaggtcaaggaagccggtgcaatcttgcatgcagtcccaggcttgcaatttcaggctcagctgctagcctcaggcatgagatatcacatatgcaccgcaccctacgtgacacttgcgcacatggatgcatgcacgccacagcgtctcggcgcgataggtgtattcaacacaattttatcatatagacagctattggtttagcggcatcagcaaagttgcgcatgcgctttctcgcttcgggacatagagaacagtcagcgtcatatatattgtcgcaacgatctaagttccctttccataattttccaaatagagtgaagacccccagatataaatacaaaacgtgataacatacgacctaacccctgactcaaagcccatgcagctcagcaaatggatcgtgaatagggtcctcatgccgagtatactcaatgctatttgagatcttcctcgccacctcactcccatagacctcttcaatccaagcaagagtaacatcaatgccagcactaaccccagaggaagaccacacattaccatcaacgacccatctcgcacgaggcacccaatcaacattcaccgccagacccgtaatctcagcccaggccatcttatttgtcgtggctcgtttcccatccagaaccccagctctagctgcaagccccgagccggtacacactgtaatgagataacacagctggggatagacgtttcggatgtacaagattgcttcttcgattgctgggttcgagccgcgcgtgcccaggccgccggggacgagaagcagatccaaagacggtgctgttgcaaaggtgtgggttggtaccacgttttggcctatggcgttggcggatgccggtgactttgttgtcactggctctagggttgatgatatgagtgccaaagtcacgctgtggctccatgagaggacgttgatgcagtccactgggccgaatacatccagggcctgaaagcctggaaacagtactacgcccatacggagcggggcggatttgtcttgatgttctggacactcaatctgttaatatgtggaatatgtgttggaagtgagggtcatactagacattcttttatggcctcgctgttgctagggataatgtgcaagccctcctatctgttgtttaaaatgtagttccttatctgagtgctagaattaaaatgggtgatctggtctttatatatacggccaggtgttggaatgaattggccacagccttgcgtcggttttgagcagattagcgcgtaagcaggaatggacccgttttaggagagtcgaagcttgccaaggtattatttgatgatagggaaaagcgtaggaattgctttagtggaaaaactgcttggctgttagttgtctgatttatctgatatatgttagcatgacgccgacgacggcagctcaaaataaccttatttccccggcggacctcggcacactgatcgccttaataatgaccggccgccatagaaagcttccgagctccgagatacaagtcggagattatgcaggatagacggggactaccaatacctgcttgttctcgcagcccgaccagtgggaaaagcattggacatcaccctaaagcctactcaggtcttgacatttcgagctagtcacttcttccaagatggctgccgcggacccctggatttctgtggtaggaacctgtcgaaacggtccagggccagatacaagaaatcgccattgtcataaaagacccttctgcaacctcggcgtggccaaacagtcagcagaagacctcccaagtttaaggacaaatgagtcaaactgtttgccataatctccggtactgaaatgctttgaacgcttgaccaattaactaattggtctgttcgttcaggtgcttacatgatcacatgcgatcgtctgcgcgatcacaccatgcatgggatagccaaccacacctcgtcacctagtgtggtagggcctcctagatgcgccactttatttgctttgcgatccgtctagtcatgttaatcgaaagtatgttctcggcacaagttttaaccaaggtctatcattaactgtggcggggaaaccatgatttggtgcagttatctcatcacgcacgccgacttctggggcaggctcacccatcacgtggacaaacagaccacttaaaagaagcatccattatggaggtgaataactcatcgccctgttctcacagctcttttccggtcttcacgtaaattcacaaggaaaagccgcgggaacccaaatatgtcaaaagcttttcgtttctggacttgttgtatctccgaatgtttggcttctgctgcgatcgatattggtctctgcgaacgctgtcagcagcgattttgcgctgctcatgccgtgcccccaactcattgctgcaaggtacgttgagctgtagctagctggaagcatgttctctaatttgatcatagaatgaccctcttgatgaggatgcatggagggcagcgcaaacagaagaagtaacggcacttcgacgcatgatcaatgacaaaaaccttctacgtcgagcttcaaagcggaacaggggcctgaattgtgcatttgacaccgcggaccctctaggggagaaccggatgggcggtatgcacatccatcttcgaattattttcagcgatggaaatgcctggcttgctcgaatcctccggcaaaactacacttcattctcagacagctttagcaatctctgcctaaagagcgaatgtgccactttagaatggctcaaggatatgaatgtgccgtcgcctacactctacgacttcggtctactgaatgaccctgagaacgatgtgggcgttgcgtacatgctgatagaggaactccccgggacgccgttgctttttcttagcccgtcagaagagcaattccgcaaactgtacgacaactacgccgacatcttgtgtactatcaataagtacccccttgagcaaatcggctctctctctttacggtccaatggtactatctgtatgggtcccgtcgtgggcgaccggactggtacattttcgcaaatgggaccttttcgcaatgcacgagagtactacgcgacttgggcggagagatatctcgaattaatctgcgaccgtcagctcttcactcggtactccgccaatgcctacctcatcttcagatacctcaaagaactggcggaacaaggccattggaatgcatttgaaccgagcattgacaatggtcccttctttctgaaacacatggatgataaaggtgaccatatactggtggatgaggattataatatcacaggtcttatcgactggacatttaccagggcggtgccaatctatgaggcttttggtccctcgccattgacagcagaaatgagtggcatatacgagggcaaggctggccgatcccggggcgacacgatcctagcagaggctctacaggccaagaacaagcatctagttcgctttgccggcggccctgatctagttcgccgcttctcatttggcctcggaatgggcatggacatatcttgggacgaagcagttgctttattccgaggtatcatgtgtacggctgaagggagcagcttggaatttgactgggatgcctggcgtcagaatcgcctatctcaatgggctggcgatgctaggttacaaggccttctgctccaattgggagaaacctaaggtttctctgaggacctgaggaagcgagaagcagcgagataacggcattaatacataaaaattgaaaaggagaagatcctaatagtgcgtagaggctttccgaatatctctttagtctatggtgcctctgtcatgtcccagaatatgaaatccgatcgttgttgtgatatgaggctggtgtagatcagagaccaagccgcaccatcggcataaatcccgagttgtctatacagacaaccaagttgattttcaattaacttggctccgtgttctatatattacctcatatttccatatataataaaatacaacatatacctctgaactacaacaaatagtgataggggaccggatacttgagcccgcaaaatcgtgatacacactgtttgccatagccccgctgtggtcaattgatttccactttctcgattaacagtaacatgagcatgcaatgggatcgtaatcatgtcatagaacggaggggagatacaacttgaaaacagaaggtccaaaattggtaattatgtatacacatgtacttgaaggtaccggtaaatacctacaccagaggttaccctatggtcaaccaatgggcacgtgaccgtgattaccccgatcgggaaattcgtatccgcggcctaaaatctggtacatacacctacatatgtaggttactgtttgacatcacataggtcacgcgaccatttcgagtcttgagcgccaattgaggtatttctattagtcagttcctagaaaggcagagtacagccatggcaaaacaactgaggccacgatatctgctgatggcctgattgggggtggtcaagtactgcagcccaaatgtaaacacctcggtattgcctatctgagccattctatgtatgttaccgggaagtgtacagaaaagcaacgaggcaaagcagaagtagtgagagtgttagtatattcgatgggatttccccaagacctcatattccttgagagtattccttatatcgtggatatacaaaaatgccaagatgccaagacctctcgacccgagtggagagtcaaacccagcaaaagatggtgactggcctaagacttgcccaggtgaacgcaaagcccccgtaagtggcttagtgctttcattccttgttttccaatgtgttttggggttaggagattaaaattacgatataattagcattaagatagctttagtttcagacattccagggcaaattattgtacgacagcgaacttgcgaaattaagactttccctggctttttcttttcatccctccaggttttctttgtctggcatccctgttattccgagtccctttgatcctgaaacccactctatcgattcgaactggtctgaatggatggatagtcggtgattcaaaacctatattatggcgtacaatgccgtcgctcaagttgaccatgaggtggcttctatttcttccgcttctgcgtcacgcaccccctcacctgctcatggacatgtatttgagcagctgccgcttgataccgatcatatcggaggaggaagccacctagaagcggccaaaaccacggacaaccccagtttcaatcagttaggttcgatgatccgctctatgacttctaccagctacgatgtggtggaggacgatgactacgacgccgatccttcccccgaagagcgatccaatagcctccgtattccacctctcaatacgactgtcgcgcgacattctcctcccgagcctccgatccacagcgcatgcagcgaggcttccgtacctctcagtcaccctaccccggatttgcagtccatacaaggagcctacaaaggaaatgtaacgcggttggaacaaagcgcggagcagctgagctcgtgctcggcggacattgaaagcgaaatccgtcgcatcgaccaagaacaaaagcgacgctcagtcagttccgcgtctaattcaatcattcaccggaatggtgcattctccccggcaaggacagtttcctccgcccacggatcgaatatgtcccccgcgcgccagcgctccgtatcaggggcgcgccttgctcagctctccgagcctgcacttgatgagcgtgagcatgaagttgatgaatttcccgggctccctaatctaccaccgtcacaacctcttttcaatacccagagcgattaccactacgatcaatacgttccgcaaggagttcccgcagaggcggagttggagcgccgggcctcggtcgcatcgaacgatacctaccagcaggcgcggacattattcaccgactttgatggcgtccatttcacacccttagaaccgggtcgccaggtatccctggagcagccgccgctcgcccgcaagccggaacattacaaacagccgcaagcaggagagaacatggtgttttatcctgcccctgtcccacgcatgttgaatctaccaccgaagttgtcgcgcaagtcaaacatggaccgggataaacgtcggacacagcttgcaggcgccatcgccgctgaggatagaaagtcaaccgctgtgctacctgacgccgatcagacagatccacgcgatagcaataacgataaacgcaagtcggcaataccaccgcatctccgtgcgagtgttttctttgatcaaccaagtacatcactccagatcgaggttgaacaagagtctgccgttgctacgctggagagcattttggacgcctctgcgaatgcacccgtttcggctttcactgatcacccttatgctggtcaggttggcgggttcatctacaaatcaaaacgcaagaccctgacaaaggatctgacagggcaaaaggcaaatcgtatttcgcgagccatgattggccatacttatagcactaataatgtagacgaggacggggcccccgtcgcttcgcgacgtgggtcggaagccgggaatgacacggatagagatcatgatgagcatggtcgtgaacgtgggtcggaaggcactgatgccgaaagtgatgaacaatctgaagacgaagacgaagaggacgaggaagacggggaattggattacattggtccaccgaatacgctcatcgctgaattggagttgcggaaacatgagttgaagcacagacgccggacggctgtgcctgtgcctttccaaggcatgcagaccactctactagaaatggacgagatggtccaaaaacaaagtgataaacggcggcagcgccctgtcgctttggcctgggaaggccgggacgaagacgaagacgttcccctggctatgttgtaccccgagaaagccggtgccgaaaatgatgatcgacctttggggttgttagccaagcgacaacaagaagaaaatgagcctctgagctcacggcgtgccaggctgcggggtgagccgatcccgcagccggagcaacggcctgctacagtgtatgcagcagagcccccggcgcatgttcctgagccgaccgccgagagtgaggaagagacagagatagagacccttgccgagcgtctccaacggttgaagggacataaccgctcggacagcaaattcgccagcgacttgatggccgaaattgatagccgggctggaattgcgcccaaagccgcccaagaagtcaccgcccccgacgaggaagagacactcgcacaacgacgcagtcgccttcagaaggaggccgctgcccaatccggctccccaaagaacccgcgaatgcgccggagcatggccgcgcttacacagggtcgtccctcccaccttgctcgccagtcgtcgcatggtgttttcaatcagcggcctgccaccatgtcccagtatgggaaccggatgtctatgcaacaattcccaacacaaatgggatacccgacacctgcaggatacccgatggcacagcaatatgggtatcctatgggccctgcgatgatgggcacgaatggcgtgggctatgctccaagtatggcagaaacccctggcccggtcaaaaccgaggtgatcaaccgctggaggcaaagcattcgttgaaagcgccatcaatgaattaattttttgcttatatgttttgtctgttagcatagcatatggtcgttttgagcgtgtcatttttctgatttattttttcctggaaggatatctatgtagcatagctgtacgatttatagaggaagtagcgcatacatttctaaggggttatggtctatctacaacataggcaaagagtccaaagaccaaaagcaagtaggggcaagaatgtgacttgatattgcagaaaggcccagacactccagcaggccagattggtgtaacgtcactcttagccgcgcgttactttgatctttttctcttctatataaatcgacataaaaatcgatatctttgctgcaatatttactatggattgttgatctacccctttcgtcagtaggcttacaggagcccgaagcttacgaaccttgaaagcccacgggtgggttctgcgtcccccacgggtcgttgtctatatatgacagcgtctttgttcaacacccagcacgtgcagttgatgactgcaatggaatattacgccccttcttaatcatcgcgactcgatttggcgtgagggccccaactgccatgccaccgtctactgtcttctcgtattggcgccgagaccatcgacgttcgtccgcgtcgcctgcttcaatccccgcgccctcacctgtcaaaggagcgaatggaagcccgattagcagtcctcctcagcttcgtcagatcccggatacaccgactctcaccactaccttcgacagtcactcctcacccgatggcccctccaacgagtcaccgctggacatcgatacttccaagctcaacatcagctcatcggtcgcgccgctatcctcctcaatcaccctggctgtcccatccccggcatttgaaagagaaaatcgtcctcattccagccccggcgactccggggaagaacagtttacatcccagtcgaacaattctcaactgtctgtgaccggtcgacgggccgatcaaggagacgcagactcgaatttcaaatcaagttcgccctttcgacgttcatttgccaagcagaaacgatcgccaactgctccgacagggtcaggtcatttccggttcagaagctcaccggacgattcgccggataaacaaacaatgccacagaaggatttcaagatggatggtgtgcccgtagaccagacacatcataagtcgggcaaggcgatgctccatctcttgaatccgatgtcccttcttgcgcgcaggcgctcctcgcaggtgattggctcccggacagaagatatcaagatcaagaaccgggatgttcctgctatgccagatgactatgatcccagaattcgtggaaagatcatccacgacttctccgcgccacggcctcgccggaatatttcagctacccagccggatacaggtgtgaatgggcaggatacttcacctccgcaaatccccagtcaacctcgtgcagccagctggaatgaccagataaaacggcacagtgaccactcgcctgttttcaaggaacattttgaggaccagaatgttctacaggtggaaaacaagggttatcttcagtcttcacttctgacaggccagtcacagcctggttatgatagctcattgccggtctttgcgcggaacttgccttctcatctaccagaaagaactatagatgctccggagcagcttgagcctggggcagagcaacctccaagcccacctaaagcagtttcccatgctcatcctcaacaaccccaagaccaagatactatccctaatgtaccctttaatccctcggcattgccgagacatctcaagagcaatgcctctcgattcagcttcgatatgagcggagtggaatcatctacgcaagagaagatgctggaagagaagcataaggccaaggaggcttctcgcagaatggaggatggttattttgacgacttcgacgaggacttcgatgatgacatgatggacgatttggatggcctggaagagaagatccccggcgtcaatgcagatgccgatgacgatgacttcgatgatttctctgtttcgagaaacatcaacgagcccaagtcctgggctattccgggattgtcacctgtagttgccagcccggtcactgctgcaccgccagagcccacaaacacctctcacctcacctccgaggccacacaattagacgatggccccagccaacaaatcccagatcaacaaccatccctaggtgccacaactgatgcgacagcaatcattccccaggcccctataacaaaacaaccgacccaaatccttgacgacgatgatgatctttattttgatgatggcgatttcggtgatctcgatgtcaataatcaagatggtggatttgatgaatctatttttgatgatgtaaacagtcatttatacgaacgaaaacgggtcgttgcccctgcagcacctttggcgacggacagtgcggaccctgatgaggacgactcttcactaggcaaggaaagccccgtggcagaaaggggaagccaaggactgcagcacatgcctagtgtggccagtgactatcgtgccacaggatccgtcaagcgtggtcccctcggcgagccaataccaaatatgggccctgtccgtgcccatggtgctggtgtgctcacagagcaaaatctcgacatcttacacaatgctttagcttttgcagccaatgaagcatcttatagtgggcgctttgagcgcactttcagcacgagcgaacgatcccaggggcaagagagtgcagcccaaacatcgcagacaatagactcgcaaccgggtctagtttccgatgacagccggatcacccaagctgcggatgccatggcctttgaagacgttttcgatactcaggtctacgatgatcagttctacgatgataatgacgatgcgtacttcgacgatgcaatcgttgctgccgctaacgccgaagctcttgagaacgatgacgatggcttctacggccaagagttcggcttctacgcacaggcagatggcactggcgcctctgagctaactaacggcggatactttggcccgcggcgagtcgaaggcatcacacggaaccacagtagccgtggcaaatttcaggagcccagcttgacccctatcactgaaaaaagtgaatggagcacacgcaactccatgatctcggtcaaggcccacgggggtactcatccaaattcagctctagcgagccctggactggcgcagctggttgacatgggtaatcttgacgatgaaatgtcgctgagcgcactcctgaagctacgtcggggagcctggggtggaagcaatggtagcctgcgcagcactgcaggtagttcaccgccacatacaatctcgccctctcaccgtgcaagcttgaatggcgctgaagcaagcccaacagtatcagaaccaaggcctttcagctccggtgagggggcctcaaacggtgtcgcttctttccatgatgatagccacacgcgtactgcttcgccgttgtcggggcggcctgattctgaagaaattccaaccagcggacctcagcgactcaatgtcttgtaatatgcccgatttccctgagtggatataatgatctattatttctctgcatatgctctttgtgtggcgattttgcaatgtcacgatttcatgaattattgttctatagttttatagttttagatggttaatgttaatacagatcgtaatctgatgagacatttttcagattcgaagcagatctcatcaaaaacaggacttggcattggtaaatgagggaattgagggagatccatgattaatagtaatacattttagttcccattgggccgaaaactcccgcaaaccagcccgaaagctttagccggtttcttgtggagagcaacttgttcgggtctcccgaggtcctgcgtcctgcgtcctgcactggcgccttagcccggcccggctataggggctgagtcagcgcaccagcctcatgccgtgacacccgtcattctcagcttccttgactctttcgcttcatttttcctctaacctccacactttgttttcttatctagagcctttaagctctctgatgagtcccgattctatacaggtgctacggcaatactagtcgacacctgctctgtgatttaattcgtacgtgtaccttgacgcctcttcctttcctctgtattccggtttgctacctgcagggacaacatggcaatatcaggctgacagtatagcatgcagtgaatctgcctctttaacgtctgatttggccagaatctcgaactactatcttccaattcccttttttctcgaaaacttcgttggaccttgatccaagaaaaatcccgcaatgtttcgaaacactgccttgaaggccaccaacagcggtatgctgcgtggtgcgaccgcttcatcatcccggcgctcattccacctcgccactagcgctcgcagcgcttcaaaaagctccggcttcagcatgaccgcccgtcggcctcttgctgttgtcgaccgtgctttcaacggtgctcggtcctacgcggcccccgcggagggccccagccaaggagtggtaagcaacaaaaatcatcagaatcggtagcgatccgatctgggttcccgaaaattcaaataaacaaacgggcattcgactaatgcgacggcgcgatctcgccattacgtgaacaggaccccaacgattctttccttactggtagcaccgccaactacatcgatgagatgtacatggcatggaagaacgatgcctcgagtgtgcacatctcgtggcagacttacttcaagaacatggaggagggtaagatgcctatctcccaggccttcactcctcctcctaccctcgtccccacccctaccggtggtgtcccccaagacatgcccggccagggactcgccgctggcgctgacgtgacgaaccacttgaaggttcagctgctctgccgcgcctaccaggcccgcggtcaccacaaggccaagatcgaccctctcggcattcgcggagaggctgaggcctttggctacgacaagcccaaggagctcgagttggaccactacggtttcaccgagcgtgacttggaccaggagtttgcccttggacccggtatcttaccccgtttcatcaccgaatcccgcaagaagatgaccctgcgcgagatcatcgccgcctgcgagaagatctactgcggctcttacggtgtcgagtacattcacattcccgaccgcaagccctgcgagtggatccgtgaccgcttcgagatccctcaaccttacaactactcggttgacgacaagcgccgcatccttgaccgtctgatttggtcttccagcttcgagtccttcctcgctaccaagttccccaacgacaagcgtttcggtctggagggttgcgagaccttggtccctggtatgaaggccctgatcgatcgtagcgttgactacggcatcaaggacatcgtcattggtatgcctcaccgtggtcgtcttaatgttctgtccaacgttgtccgcaagcccaatgagtccatcttcagcgagtttgccggttccactgagccttccgatgagggctccggcgatgtcaagtaccacttgggtatgaacttcgagcgccctactccctccggtaagcgggtgcagctgtctctggttgccaacccctctcacctcgaggctgaggaccccgttgttcttggaaagactcgggccatccagcactacaacaacgacgagaccaactacgactccgctatgggtgttctgctgcacggtgatgctgcctttgctggccagggtgttgtctatgagaccatgggattccactctcttccggcctactcgaccggtggtaccatccaccttgtcgtgaacaaccagattggtttcaccactgatccccgttactcccggtctaccccctactgttccgacattgccaagtccatcgacgctcccgtcttccacgtgaacgccgacgatgctgaggctgtcaactacgtctgccaggtcgctgctgactggcgtgccgagttcaagcgtgacgttgtcattgacatggtctgctaccgtaagcagggtcacaacgagactgaccagccttcgttcacccagcccctgatgtacaagcgcattgccgagcagaaggctcagcttgacaagtacgtcgagaagctgattgctgagggtaccttcactaaggaggacattgatgagcacaagaagtgggtctggggaatgctcggcgacagcttcgaccgcagcaaggactaccagcccaccggaaaggagtggctgacttccgcctggaacaacttcaagtctcccaaggagctggccaatgaggtcctgcctcacctgcctaccgccgttcctgccaagtccctgcagcacattgctgacaagatctccggtaccggtgttcccgagggcttcgagctccaccgtaacctcaagcgtatcctggccggacgcaagaaggccgtcgatgagggcaagaacatcgattgggccactgctgaggctctcgctttcggttctctcgttgacgagggataccacgtccgtgtttccggtcaggatgttgagcgtggtaccttctctcagcgccacgccgtcctccacgaccagcagactgagcgcacttacacccccctgaagcacgtccgtgacaaccagggcagcttcgtcatctctaactcctccctgagtgagtttggttggtaggtttttgttttgaaacttcttgtgtaacgacgattctaacagacaatctagtctcggcttcgagtacggttactctctgacctcccccaacgctctggtgatgtgggaagctcagttcggtgacttcgccaacaacgctcagtgtatcattgatcagttcatcgcctccggtgaatccaagtggctgcagcgttccggtctggttgtgtctctgccccacggttatgatggccagggtcctgagcactcttccggacgtatggagcgttggctccagctttgcaacgaagagccccgttcgtaccccgaggctgacaagctggaccgtcagcaccaggactgcaacatgcagattgcctgcatgaccacccctgccaacctgttccacatcctccgtcgccagatccaccgccagttccgcaagcctctcgtcctcttcttctccaagtctttgctgcgtcacccccttgcccgctctgacatcgaggaactgacggccgaggactcccacttccagtggatcatccccgaccagggccacggcaccgctatcgaagctcctaaggacatcgagcgcgtcatcctgtgctccggacaggtctacgccgccttgactaagcaccgcgaggccaacggtatccgcaacactgctatcacccgtattgagcagctgcaccccttcccttgggctcagctgaaggagaacctggacagctaccccaacgctaaggatatcgtctggtgccaggaggagcccctcaacgccggtgcctggtcctatgcccagccccgtattgaaagcctgctgaacgctaccgagcaccacaaccgccgccatgtcctgtacgctggtcgcgctggcagcgcttccgtcgccactggtctcaaggccgtccacctcaaggaggagcaagacttcctggaggaagctttctccattcaccaggatcacctgaagggcgagtaagcgccttcctagagatttgattcgacctttgttgttgatgagatacttgggatcttgcactgacgcttccagtgagttgggtgtcatatattcatcggttttcttagaacctagcgtgtaattccttgttgtactacctcttttattgtactgatttcctttgtgtgtttcgatgtgtcctaggttcatagtcataggctatgccaggacagtcttttggttgtcctaatgtaaggtccctcgtctatacctagaatccattctatatgtaaaatacaaagaatccttgacttttgaagacctacactatgttttccgcgtattttgttctaattctccgtagctacatgaactgtgtgtactgtatgcaacacctggacattgttcctggtatgacgtcacccgcgtgctggagtgattcagcaattggtgcctgattggtgccgcaggcagcaatctcacctgatccgattgccaatcactcttctccgcactcaaacttcccagcagcagcttctcctgcatcgatgcccttctgttgctactcgagttgttgactattttacatggtcccagatcatctccgaacaccattggttcttcgaaacttactatttcctcctcaatcgaggtaggctcacctcaaccctcctccagcggcgcagctcctagtctagacgatgccattcaccatgtccgccgtttcatcgtcagtcaataatcccccgggccaaggaatccgacagtctgcccgtcagacacgtacaaacccgtctcgaacctccaaaacgatcggacggtcgtccttcgcgttcggccgcggctcaacagctgaaattccttccacgccccctgttccccacggcttttaccctgcgctcacgcattttactgatgcgataacagcgcttcctcgcgagttccgtcgccacaactctcttctcaaggaagttgatgcgaaggcgtgggctctcgaggaaaatttactgcagttactccagttctcctccgagtcgcagcccgttccccatcctccccacccggcgcctattattgagggtgtgattcgggaggatgttttgcccaaggtgagttctgcccgcgatttgtctaactgtctactttcaacatttactgataacataacctctcttgcatcaggagctatctcagtcgtcggaatcgcccgagagcaaaaaccgtcggcttctcttcgatcgtgtacgtcaaagtctctcggacctgatgatgaccgccgatgagaagaaccacgtcatttcgaacgcgaacgaggaattagatcgccaagttgtccgactggatacggtgttcccatacattgcaggcgagatcagcgaggaggctcgtctaggcagtctgacacactgggcgtactccaacaagagtaccgcgaaggcagcgactaacgaacgcccgcgccgggaagcagtagcgcaaagacaggatctgtcgcacgtgcttcaagaagccgaagctgctagtcgcagcgaggcgcggcgcgatgctgttctggcacggaagcaacgtcgggcacagcccgacgcggactatgaggatacacgcagctcgggcgcccgcaagaccaacaacgcgaaatctcgaggtggagaccatgcggctgacccgaacgcagcacccaagcgtcggaaggtggaacgaccagtaccggtagacactagtgttccgatggagcgctccgctagcggcgctacgagccagagagctgcgaataaagacccggcagagaagaagcggtctcgcgcccccaatcaggccgctgctgcccgcaagaagtacgtttcatttcgctgcgctcactactgcatccgactgactttattctagggccaacgcttccaatgctgcatcgcccgttctggctccttcgcctttgattggaacattcaatggcccaaggggtgctgccagtccgggacccaacacatcaaggccacagtcgtcacgagcgcagcagaattctggaccaagcaatccgcgcgcgcggccatcatcatcggcttcaaaccttcccagcaacagtatgccgcttcaaccacccctcccggaattcccaattaaccatatcccctacacagacaaaattgccgactccaggtctacaacccgggacgggcccgtcaaatacgaactcgcagatacacaccgtgactatgaaggcgagaccaacggtagaacgtctgtaccagcgggatccaagcgtgaggatctggatggaaaagccggttccgtcgaggtcgagacgaccaagggacgcaattccaagacatcaacccccattctccccgcatttaccgagcccagtcaacatgcacgacccacgcgaagtcgagacccagcttctaccaaacgaactcagaagaagcccatcccgcagcctgcaataccctctgacgacgagtcgcttcatgaaggcgatgacgaagacgaggagggtgagccgcgctactgttactgtaatgaaatcagtttcggcgaaatggtggcttgcgataatgacgcctgtccgcgtgaatggttccatctgtcgtgtgtgggcttgacgaaaccgcctgggaagaatggtaagagtttccttgccttgttgagatcgtccagattgctaacagtttctattagttaaatggtattgtaacgagtgcaaggaaaatatgagacggagtcgcaatgggcggtaatatgcccccttcaaggtcatagacgttgatgatatggcgttatgtggtgttttcagttggcacatactctggcgtagatacggccttgctagttggtattacagacttgattcatttgaggatattgtctgacttttcgtccattagtacctatctctttaaacacagagtattgcagtattgtatgtacgaattaaaggcgagaattgcacagggggataccacatgtgctcatgaattgatcgagaatgaaagtatgaagataggcctttgaaaacaggctatgtctaatagcgcccagataaccctatgatccatcccatccgcagtacatctataccagatagacatgaccaaccagccttgcatagctcaatcaaagaaacaagatactctaccaatcacgagtcaaccgattaacaaacgcgccagcctcagcactatttgcacgtctctgagcctgcgcaccagacccctccaaccccgaagccgaagcaacctcaccctccaatctccgtcgtagatcctcatacctttctctctccgcgccaccagacccagagtccggaccacccctccgctcctgctcgccaaccacccaagccggaatgcggaagccagtgctagccggggacagacccggtagcagctccgcgcgccaggctacgccgacgacccagcccacggctgacgggaggagcatggcggggaactgggagagggctagctgggcggcgacgatataggtggttgatttgtcggagaggaggagggataggcttggtggttggggttttggctgtggttgtggctgtgtggtatcggaggaatcattgctggtattgttcgtgtttgctgcgggggaggaggatgttgacccgatgcggtagcggtaggtgtatgggatagtggcgtggtactgcgccagcagagcgaagatggtcgctgttgggccggaggggaggtaattgaggttgtttagggatagagggcggattaggagggcgaggagaattggcgggaggagagttgtatagggtagtgtggtgagtaggaaggtctatggcaagcaggatcatgttagcaatcgggttccagatttacggaagtctccagcttctctgttccttcgttgcatgtttctatgcgtgtctgcaggagcgaggacaataaaatgaaaaaagactaaccgccatcttccgcttcccccacgcgcgttcgacaacccgtagatggtagactagcatggcggcaaaaagggcctcggtggaattggtgaagccggcaacttgccacgccaatgcacgccagaactgggcatagggccagatatgaggcgatacatagatcacggcgaggtgttttatgtcgaagagggagagggcgatcgatgaggcgatcgtgtagatgaggagggatttggtgaggggcgcatttgtgaggccggaggtgagcatcttgaggccccttgtgtttctcttgtttagtgtgattctggctcgagggtcatccgggttgggggagagttggaggaagttcagtgcagctgaggggacagatggcacgaaattcccgaagtccggggaagatcggcatgccgactttggtctctacattatgtcattttatatgccaatttatatgtagattaatgggatatcggattatccgtacgagtcacacattgaagctcttgtagtatcatattatacaccctatgccccagtatcaaacgccagagttgtttccttctatgtccctgccatctcttgactagctatggccgcttctttacttttctgttcggccaattctctttgatatcgagtcgatgcgacctccagtgcatgaagcgtcggaccaagaagttggttcacaaccttctggccaccctccacgccttctaagttgacacgcaattttcgcccggtgctctcgtagacatcacgagcctgcttctttagccggtcgacttcgaccttccgctcagcctctgcgtcattagcaacagcctcaatacgctctcttgctcgctgaagagactccgctagggacgcgacctccccagcgcggtcggggttccccgatagaaacgcctgccagaactggtgcaggaactccgtggttgtggcgtgtgtcaatgtcaagcggtcaaagagcgccatcgacagcccatatgtttctgatgctgctcgctcggtcatctgcgcacgacgcacgcgcagtgcttccaagagctgagagaatgcatcatgcagagcggcagatgatccgacaggtcggcggctagcaggtgcatcctccatctcctcgtcttcatcatcgcccgggtccaccaacttgcgcagttgtgtattaccctgcgacgggagattttgattgatctccgcacggagggtctgaagaagctggtccggatcttgtttcgcaaattgcttggttttatcctcctcctggccatgagtgaagaaccgactttgatcacggatgtttaaagtgatgcgactttgcgcttcttctccgcgaaggtcctgcagctggagctttttccatgcctcttcgttgatgcctatcggcgcactcatatcaccgtcggccggagccacattggccatgatcttttcactaagactgttcagtgtccggataatgggcactttgtcgacgccagatggtctcatatctagttcaggtcggtttccgcgacgctgactgtggtttagttcattgccagccagatccaagaagtgatggatatttgtgtcccggtccggcttagcgccctcatccgttcggaggtatttgtccagcacggcgtcggttgcgtcggcctccgtaatgcgctctccgcgcagctttttgaacagccgactctggaagaaccgtgaccagaactgttgctcgctgagtttcggcacattctcatcatacacgcgtttaaccagtgggtgttgtgagaagatgagctggatttgctctttgctgatattcaatcgtgtcacgttatcctcgactcgaggcttaagtgatgatagcacattatatgagccacggatttggccctgttcgattgcgtgcgctcgcagtaaatgcagtcgtgttgaccagaactgtgaaacgaatgatccggacgacaaggcttccggttttgtgtgcaagccctcgaaaaacatccgctgcagatttgaatcggatcttaataacgactgctgcagctctatgtcggaccgaagcttattctcgtcgtccaaaggactcttcgacgtccccgcggatgtcacagcattcgcaatcgccattgcagctgacagaccctcggaaccacctctaggccccggcgtctgggatggtgtggccgacttcgctgaattgatccgagcactcaatgtgtctttgatgacatcggcctgcgggcgggcgtctgctccagccgtgaactgaaagacatattgatcgggggtactatcgggaggcgcatcgggagcttgggcaaaaattttgagcatcactttcggattcgaggctggggtctgctgtagatctggcagtcgcgcgagtcagcaaagagacaaatacacggccttggagtcactgcgtactagttatgttgaccacgggaattgtgatcatgttcccagcccctgcaactgcaggactccatgagactgacttctcatctgcagatatagctatggtcccatctttcttcttgtaagaggccgctcccctcggtgacatcgtcgcgtgtcttgacagcttgcactgtcttcaaaggcgataacgcatccacccatcgggatgagcaattccccaagggcggaagttagcaaggagggtctgagaccttcgtgatgacagggcgtgcagaggtgaaaccaataacgagtaatgcggctcttctgcggttcatcacatgacgtttgacgttttgccaagcgtcacctggcagccaagccctaagtgaatggagctacagtttcatttgtcaggtttagtctatgtgaacatgagaaggaccttttgaatttatgcttaattttgttctcttatctatttgtttggcttgattttggcaagttggatttgtggccacacgtagaaacaatagtgaccaatgtgccaaagctctctcaggcgagagtttctgtaaacaacgtgagtggatatagatacataacaatggcttatactcaagaataaaagatggagtgaggaaatacggcaagaactaccaagggaaagagaatattggttgatagtttacaaaaaaacaagatgcttcagacatactaatcaactgcaacacagatctgttcccaggttggcccatagattcaggtagaccgttttcaatcgacgctgcaagtccaggcagatatcctacccgtacttgaaaaacttctccaacttctttttgcgcacctcgatgagtatctcctcaaacatgggcctggcttccttcagaattgccttccgaagtgcatccttgagcactttttggttgtggttgtagttgtagtccacaaagtcaacctcctccagcactttctttagcccagcggcgaagttcctcatcactaccggcccataaccaggaaagccattatcgcaatagcctgcctgcgtcaccttgccaggcctcgctatcgctctaagtatcaccaccctgattaggttgagagtcctttcttccgcttcattgctgagcgggttcggcagtttctgtatcacatccatatacacgctcacgcccacgcgtacagccattgcgtgtatacgtttctgatctctgcggttttcttcttcttcataatctttgtcagtatcggttcataagtactttggtgatttgcacttcgtctgtgagatcggggcctagcaaaggcagctcgtccacaacctgcaagtcgaaatgaattcttaccggtgattacttcccgtgctgtaggggacgtcatacaagcaccaggcggagccaaagcatcatcaaagatcgacatgaggatcgcaatggtatcttcgtggtattttccggtccagcattgtgtttcagccgtctatgtatatcattagcaccaggtaatctcctatatgcatcttagtatacatgcctggccctcctctctcatgcgaaagaacctgaagagatcaccatctgttgcaagtgcatatgcaatgcggccctctttcttcagacgcctctggccggtacggatcacacctatggctagttagtaatgacggaagtgcaatgccatggtacaaagctcacccgtaagccttatcatctctgagctgattgccttggtactcaaaacatttgagggtcgcatcacagccaggaaattgatgctcttgtcctctgccccgtaccaaaaagaacgttcaccatgtccatgttcgcgagccctagtagaactgccacatacacccatgtaagaagaaccaaagcgagattggacgtctaggggtgatggctcgagcatgtgtcccttcgtcacttggaagtggacggtggagaggagtgactcaacccagagtctttgggatgcttcattttccgattgggacttcagtgccttgagaaatttgtagaggtactcttgattggattaaatcggattttcttggtgaacttggtacgggaaacacgacttaccacccgagcattccatcgatagagccaaggcgagtagtggcagactgcagttcagcgcggtggtcgagaaggcaaaagagttagccaaggagatttgagactgagatagctgataaagagagaggtgatgatgaggagaggggacaagaggtcaggaagtttgtcgccaggttagttgcctatttgggaccgcagtggtacttactcagtgagcctgactctgagtgctctcactaaaagcggcggcagaggaaaaatggtacgtatagcgacgaggcaggcaggctatgtcagaccgagtctacgaaacagcttataaaaagatggagtagagactaaataggtatttatgagcagagtagcaaagatccagatagatacagtaacgccatatgaagccagtgatatgagagaaaacaaaaaaagaaaccagacaccgctgaagagatagatcccaatgctatgcaaaaccaaaagacaaaacgcgaccgagagcacgaacccgaagccaggagccagaatgccgaaattcgtaaaccatgttgcgcgccgccatgcatagaccggatatcatcattcatgatcgtcaaaaaaaaaaaaaagtaaagaaaaacaataagcaataagaagcaatacccctccaacgaaacgcaagccgtgaaaatgaaggatatcaaatcaagggtattagcaaaagtgaaaaacgacccatccaaaacgctttctttttttttccgaaaatagaacgctcatagtagatcattttttgaacatgtagtggccgtagaggccaccgacctcgccaacggccatggggatcttgcgcataccccaccagcgcgcacccatcttccagtagcgggcaccatcgtcaaggggttcgtggggcatcgaggctggttcgcgaacgtaccagccacgacggccaaggtctcgcacagtccagccaacggatacacgctgggtcttagcacgctcacgcagcggggtgataatcttgtcactgaactcaacgacctgcaaggggtagctttggtccgagagcagcaaacaagtgctggtgttgaaaatggcaccaatggtcatctgcggcaccttggccagatcgaggtagcagagagtgctgggggcattgatttcgactcccgttgctgggttgcggtaccgaccgaagaacgagtttacatccgtgactgagagatccgcagagctaagacccagctcctccaagtgtttggtcagaggcaccaagtgtggtacatggtccgaggtgaccttagctccacccaggttaagggagcggagagtatcgggaaggttcggcagcagagcagaaacatccgtctcttccagaagacggaagcgggtcgggtccgtcaacaagttcaaataaacgagggactcgttaaccgacgggtgggtggtgaggaatttaaccagggcgcagggtcggaggcgcgtgcatcgggacaagctcaaatgcgagatacgggcagtctcggggatggcgacgagggctgaatcgttaacttgagtgtgagtaaggtcaaggtgcgtcaaattgaccaatcgcgggaggaggtagtcgaacatgggagcggggatagtgctgcattcgtgaagtgagagccgcttcaggttgggcaaggtcatggacagcgcaggcccaccgaccaaggcctcctggaaaaccccagagaatgcctgagtcgagcaaccgcagaaatccacggcgcgcaagttcggcagccccatgaagagcttccggatcacatccacactaatgtcgccttccaggtgttcctgcagcaggcattccttcaagttgggtagaagttccaagcactgcaagagggtcctggaggtcaggttctggatttcagcgttcatctgcttagtgcgacccagaccgacggaggtgaagtgcgagaagtccagacggcgcaccaatgtccccaaagccggatactgcgacatatggttaagtgccttggagaaaataatggagtgtgggaaagtcatgttcctgtacaaaacacccaaagtcgcagcgtgcaacgtgtgggaggtaagcaggcacgagaccaaatccacatttcgaggggcgtatccatttggtggaagatcgatcgcaaggttagagatgatctggtctaccaggagttagcacatgaagcaagaacggcaggtgcgactgcttaccaagaacctctggagggagcctctccaaagccgatgtaccgggaggggtctgctgcagaacctccgcctccgggaccttgggagggagaagctccattttctcaggctcctgggcttcccatgcccatccctttgcttgtaggtttccaagtccacgaagatcgctgtagctgcggctcaaactcttcccgcccaatcgaatctgcttccacccgaggaatccaccacaaggacagcagaagtccggggtctgttgcatttggaaggggcgctcaaccttgcgctgttggtcttgctctttgggagatggtgcttgttgggtgtccacgaaggattgcgcaattcctagattacccatcacgtcagcctccagcccggattcgcacattgccggtacgtaccgtcctccgtgtcttctttgatagaaccgaatgaggggcgacgctggctgctcgacctggacccgtctggggtactgcagggtgagggagacgagtcgcgtgagtggaagtgatcaccacagggaattgaagaaagtcgcgggaatgccggcttggactgcgaaggggcaggagtaatggaggtcatggtgaagaggatttaggccctctataaagggccctaagtgtacagtaactagtggagtaccttggagcaggtggaaacacaaaaaaaaaaataagtctaccgaaattaaaaatcaaatggctttctctttggtgaaaaaagaaaaaaaattggtcctcaacagaagtgttcagagggcaagttttagggctccctcaaaagagtgggcggggaagaaaaaaaaaaacgaagctgttagtcacggaaacggatgaaccggtgttgcacaactttggaggtaagatgggctttttccgaggatattccaagactttcgactttcgactttggagattcgtaaaatgaagaaagagtgaaaggaagttgaaggttgaaatgaagaagaaatgcacccacgggtcatggccacatggggcgaacttttttattttttattttatttcttataaaaaatagaaaaataaaaagaataacgggtgaactgattgattacggtggcggatctgtactttcttttttatcattattcttctttaaatatgtaactatatgaatatgaaaattaaagagttgagtactactttgtaaatgaatatacattgatatatcaaaattatatactccatacatcaatgctatacttccttatatcacaactagactgattaagttcgtgttagttccccaagctacccctgcagaccccatttgcttttttctttttttttatgcatgcggaaaaaatggcgtcacttgcccacatttggacctgacagagatatttttataatttagagatgcacctaggcaaattaggaatatgactttggaatagttacatacttatatctacatgcctgtacctactaaaaaggctatgaattctatgacataatctcaaaccttcctacctagctagatccacgggtactgatgtacagatgtccctacgtagcctcaatatttttcttaaaaagtgacaggtcagcagatcaaagagtccgatgcatccgccttggatacagagttgctattacctaacaattagctattccatgcagctaactaggtaacatatcaacagccctgggcagattcgcctctttttttgtttttggggatgcggggatagacgcgctattacataatgagaaccactgattcccgtcacctgatattattacggcccgtgtcccctttcacattggatccctcaagttcggagtcctccgcaagtcaattcaaaagtctcgggattccggctatggtggactgggattggccaaatttcgtacttcccactccctgctcctccatacttccatagtacgaaagtacaacatacaatatacatactctcaccgactcccagccaagcccggtgatccacggtaatgccacgattatgcagtcgatcgtcaaagccaagcctatagtttctcccattaaatatgtacacatatcccccgcttactgcctcccatcctttcaaggttggaatctctcggcttctgcccagcccggtcctgcattcttgtccatcctgagttgaagtcggaccagattgctgactagcattgcatccaaggttggtacgacttgcccaacagtgttggcaaaggcttagttctcgcgctgcaactgaacaacctgggagcgatgcaacccagtctgaatccaaagccttgataggtcgttggcctcattcgagtcacagctctctcctggcctcttgggtttggctgtcggagtgagtacagcatgtgagcacagcatcgggcttgactgcatgccagccaagcacttccgcgggattacgtttgccgccaaggcctccgcattgctcgacacacaaggaggcagatctgattttgatccttctctccttgctctactccgtgtttcttggtgctcttgaactaaccattcaataactaactactcatgctcaacaaagaatgtcaccccttatagccaaatggtctgactataattgtgagtaccccttggttttgttgttcgaatcgtgccttgtgagaatctaccttttccctgatgaacgttttttaaagcgtttcctattacctgacaccccgattgtactacgtatttttgggaatgttgaaatttatgtggatactgaatggaaaagaacaatgtcattgcctggaaccatcatgacatattgcgtgcgaatttgtcttgttttcacaaacgacatgaacagatgttgacaatggcctactcgcagcaattctagttttcgtttcgatcagtcccgcagtatctcgggctgtaatctgagtcgggccaagggggcagatcatggatggatcaaggctagctcagccttaagacaacccagggaaacgtccaagccgccatgacaagtctgggtatccagctcgcctgctattccaatgacatccttcgataggatacatcatgttctatatcagtatatatgtgaattatacgtccttgggtacatagtccaggaaagaattatgaacccttgtcttcaagtaggaagttcttcatcgtttggtctgctgaggataaatatagtaaaccccactcgtcggcagtccaaatatataacacttttggaaccctgcgtttcttagaagcaatcatttgctgcagcgcatcaatagcgatgggtcttttgtaataacagtatcacaaatatcatactccattcatatgcgaagagtatccaaccttgaaaagccgtactgcatcatcccacatacaccagatctgcctggactatatagaaaccctaggtaaacacccaggacctccgtccaagtaacaagacttgttaagaatggtaatgaagaatttaactaatcagaagacttaactggcaaccggcccttgccctcaattttttcattcttattttgcttgttaatgtacaatggtactgcaaatcccaggaagcaagacctggaagctccctctcagctgctgcgctatctgaaaggtgcacctcactttggcctacagcttgcaaagtccaattcaacagacggaatccaaaaccaaagcctgataggctatgttgactcctcgtttaacaactgcgaggatggaaaatccaccgaggcatacgtattttactaactatgccggagcgccagtttcttggagctcacgaaaacaagacattgtcgcgacaggaagcactgtcgcggagtacattgctcttgatggagcagtgcgagaagcactatacccaagaaaaatccttctctagctctgcttgctggatgatacgaagccaatccgtatttgtacggacagcgacaatgccgtcgctattctcaacagagattcatacaacaaagggaccaagtggctggatgtcaaataccaatttgtgaagcatgcttgaggacaaagcagatccacattatatttcctcggcactcttcacttgctgataccgagcaataacctcctcacttcgacatatatgaagatgcgagttggggacgtacactcgcctatttgccctgtctccgcagccaccccctggactcatgcgagtctaaccatcgaggtacctggtccttcaagggcttccctttcatcgataatctaaaacacaggaactcgatgaacacctttgtcactgcagtattcgcttcgctgcatttcggcttctgctgaagtttatgaaacggaaaatagcacgcagagggtaatatctctctcttactgattggaatttcaccgtactgacaatagttgcatataacccaggaatgaaccatccccagaagcaatactacgagcatcaacaaactcatctatcctgtttaaagacctatgggagcacttccactcctgtcaatgcaagattttcctatacatagttattggtaccatgttaaagagcctgagaaactaattcaattgcccctggtcagctacccgggacccgtcaaacacgatgcaatcaacgacgacgggtgctgcagataggctgtaatcagctcgctatgcccggaacctcaatggggagaactcaacttcccaagggaataatcacaacggcgatcaatgaaactcgattgcccagacacaacggaaaggagtagggtttcatgggttcttgagtgaatgtgagacgatggatcaaacggataatttctttctgtttcctttttcttgtaaactgaggctagctagctgaatatatctagtgtcatcctggaaagcaaggcagtaatgacaaacacctattccaagactggttaatcagagctttttatgcggaaggttgcgattctacaccatgtccctttctacatagggaagtgagatttaggggaacatggtattttgtttttactactagatctagacccacgtcgtaagacacacgagcatactatcagcatatcatgatccagagaatagaggtcagaatttggaagagagctataatttgcggcaatagcgtgagacaagctatttttccaagtcgactcattaatagctatagagaaagtgaagtagacatgcatgatcgtgtccactctagtctacgagagacctggcggctctcgccatgcctagttcgatatccgggcacacacatatcctatgatgtatgggtgggcaatgtctctggtactccagccacaaccttcccgagagaacaattccaccagcgcaaacgcaacccgagacaacagtcccgtcccggtacctcgttgctggggcaagacatgcatacccgttcaaacacctggtctagaagcctggagtagaacgtaaaatgatctagatatgcgtacctacccgactcacaacgtgcatgtcttagaagattccgggtagtgttgtttgccactctggcggttagatacgaggtaagtgtcttggtatcttggctatgtgttagggttttgtgcttctttttcttctagtagaagttcctggctttcccgagacattcgtggtctagacgtggaagtttagaaaattgacgatgggtagtatgtgtttttgataaacgccctgtgtaaattatgtatactgcttttaacaatgtttgtttctgtgccgtgtaaaggtcaagtatcgaaagaatattatacggagtatcgtatccatgggaagagagtagcgaaggtctccacacgagctctgccatcaagggactcccttaggataacatcaccatgtcgtcaatgattgcattttaaaacttgaacgcctggaaaaatagaaactttttaaaatacgcagatttcaagaaagagaaaattacaaaatagtttaaaagaccgattgacgacatcaatgatgaaaattgcatgatatggtattgggatattgggggaataactgcatgcggaaatgtgtaaaaaaagggaaaagacaaaacaaaagcttcttcgcatcatggcacatgaaatgtaggaatccagtctaaaaaaaggggaagaaaagccaggtcgaatccaccgaccatccacattgtaaaaagtagaaagtaaatctcagtcttttctcaagccaaaccgacgtgacaaaaggatatcagaagtcctaagccccaaaaatccaaggggcacatgcatcagagaaataaacggtggaaagaaaagaattctatgaaacaggaaaacgccacgggagaaatccttctcaagcccagtatcacatgtcttttttgagtttcgtttcagcgtgaaaagatcagggcgtccctttttactcaatggcggaggcaccctcgccgtgagtgacggggttgaccttggggtcccacttgagcttgaagtcggcgccaagctccttagcaatggcagccttgacggcctcgaggacgttgttgaagacaccgaagttggcagggctgttggggtcgttctcgccctccttgccctggaagacaccagtgcggaccaagcaagtgttccagccgtacatgtttccaccgatgatatcggaggcggggttgtcaccgaccatgtaaatgttatcgggcagacgggcgacgccgtggagctcctccatccaggccttcatgacctcgtcggcataggtgtaggtagcacgctcaggcttaccgtagacaacacgctcaaggtcgacaccggtgagagtcttgtactgagcctcaacggagatacggaaggcaccctgggtgagacgggggagacccttgtgctcagtgggcatgagaagatcaccctgggagaagtagatggggatgcgggtggcgacgggatccttggccttggtcatgagcttgccgtcctcggcgagcagcagatccataatgacctggaaatcggtctggtagtcacgggaatcggcgaagaccatgatggcgtcgaacttcatctgggagaagtcgcggggcttggcctcggcgcgctcggcgtcggtgagagtagcccagggagagatggaggggtcccaggcgaggagatccttggggtggacgacattcttgaaaccgtagttctcagcaacctcgcggatcttgaagccttcaccaccaagaaccagaacggtctcatagtactcagccaaagcctgcatgggagtgtgggactggatgaactggtcggtggagatgggctgctcgaggatctcggagagctgagtacagcgagcctcctcggtcttaccaccaccgttggtcaagagaatgtgggggatacggatgcccagctcgttgtcaccgttgagcatcttgagggcgaccttggcctcctcaatggcgtggttaccgtgtgccagcacaccatcaatgtcgaaagcgaaagccatgttcttggccttcgcagtcttctccttgttaatatcctggacctgagaggccagaatatcccgggagacggaaggacgaccgcgctgagcagatgagaggcgggacaggcggggggagcgggggatagggagcgaagtgccgaaggagttacgcgaaccccggcggtccttcatggagggagacaagctcaggttgtgcataaattgagcggcatcactgatggcgctgcgggtggcggggatctcgacggtgttgccgcttgccgatgggatggcgaggccggaagcagcacgctggtcccggggagatagagcaccctggggatcctgggcgcggggatcctgggaagccggatcgactgcgaggtcggaatcctcgaagcgagtcatgatgaaggtattgaaatggaggggaggaagtagaaggatggatgaacttctacttgggagtcactggattcaggactcagggaagaattgaggttgtaaaacaaggaggagaaatgaaaatggactgataaggatacaagatggcaaaagagggagtacagcagagtatatatacaagccatatctgataccggactcaaatggagacaaacgaaattggtattttgccattgaggttacgagggctccactcaccgggtatcatcattcctaggaattatcgtcatcatttggcaagagatataagggtggaccatttctctcgcaatgagacaggcctgtacagggtacctgcgtcattgtggctgacacggtgtctttgcatgtacctaatacacggcacgttctccttcccgcggccgaattgaatcagaaagctgttgattggacaggaccagacttgctgggccgagtattgaagcaacgcagcacgccgagtgggtagaaagaggcctgagtcggacggacgattggactggagcgcagttcgcccgtggaccgacatgagatcgatggagccgatgacgatcaggccaaacgctcaaaacaccgtttcggttggtgatgtcatagtcaggaggtttgaaaattaccagtggtaattttgcgctttttacatttttctattattattttaataatttttctgacatatttattttattttatttaacattttattttattttataaatttgtctctctagttctcattttgtcagggcacggtgatcttcaaagaaagaacaagagtcagggtctcggatcgacgtatagaaaaggaaagtaaggctaagttgcaatatacgtatattctgtatgcaagtgcaatataaaaagcacattgcaatgcaaagttcaattgaaatttcaataatcaaacggaaattatataattcccattcccaaggttccaaggttctcctgcccctccaacccctccaacccctccaccccacttccctcgtcatcgctcgcaagcttcccccactcttcaccttcttatcttccaacagctcgtatcttccctctctttcaattctttaactatattcaaactaaatttcaatcatgtcatctggaaagactttcacattgagcaacggggtgaccatccctgccgttggtttcggtaccttcgccagcgaaggctctaagggcgagacctacgccgccgtcactgctgccctcaacattggctaccgtcaccttgactgtgcctggttctacctcaatgaggatgaggtcggtgaaggtatccgtgatttcctcaaggccaacccctccgtcaagcgttcggatatcttcgtgaccaccaaggtctggaaccacctgcaccgttacgatgacgtcctctggtccatcaacgactctctcgagcgtatgaagctcgactacgttgacctcttccttgtccactggcccattgctgccgagaaggatggccaggagaagcccaagattggccctgatggaaaggtaaagagaagctttccccgcaagcacacgagcagctcccaattaaccttctacagtacgtcatcctcaaggacttgaccgagaaccacgaggagacatggcgcgccatggagaagctgtacgccgacggcaaggccaaggccatcggtgtgtccaactggaccatcccccagcttgaggccatggccaagttcgccaaggtccagcccatggtcaaccagattgagattcaccccttcctggccaacgacgagctggtgcagtactgcttctcccacaacatcctgcctcaggcctactcgcctctgggatcccagaaccaggtccccacgactggcgagcgtgtcagcgagaacaagacccttaacgacattgccgagaagggcggcaacactctcgcccaggttctcattgcctggggtctgcgtcgtggttacagtgtcctccccaagagctctaaccccaagcgcatcgagtccaacttcaagagcatcgagctcaacgatgccgacttcgaggctgtcaacgaggtggccaagacccaccactgccgcttcgtgaacatgcgggataccttcggctacgatgtctggcccgaggagactgcttctggtctgtccatttagattttgtgacatttacaaaaagacaagaataatacccccaaacggggattccgggtggaaatgagttaatgaacggactacgaaccctgttagatgaattggacataccattgatctcactcttatttactgtgtttcagctgtaccgtagattgaacaacctataactcgggaccttttgagctctttcatttggccactaatcagccaacctcacacaccggctgccacagccttcatttcgtaggcccacacacccgcacaagatccacccatgaatatggcctatatccaatgaacgaggcgagtcggaccaaatgaacctggaataagattacacccaatattgagagaccgctggtaataaaataattgaaatggaatcccgcaaaaatttgcaaaaggaccctgcagttgtaacagtgtcgtgtactactatgtattccccggaagtatagcgaagcattgtcctcaaccaataatccaagccaattaccctcaaatgaaaaaccaagaaaaagataaattataaattataacccgttagggttacactgtacctgacaaggcaaccccttccaaggttagtcggaaatatagtgttgcagcctaaaaaaaaggtgcacatgtgtccatacaaccgttgtataagtacggagtataacagtacaacatataacatataacaacctgaagtttaaaaaatacaaccctaaaaagcggacatttgcagaaacaggagcagtgtgctccgagccctgcaaacgatgtcatctcgcgttgacttgtggctctcggaaccccctgcgccactcaaggggcttagcgttctcgcgcgcttaccgcatcgggccttagcgttgctgactactgtccaacccgggaaatgtcggatgtccttgggctatggatagtagaagatgggcatactggttgctgttaacaccgaaacgccgaatagggtaatggtgttttgattatttggatgttgtacattttcccttgaatattgtttagcgcttgcggtttttattcgctattggtttacccgccgagtacatttgtagtctctatgtattgtactagtatagtgccatttctcttttgggtcagtgtccgggttcatttactatttacgggatttaatgcctcatttccttttgtaatgaaacactctttgactttttacctgagacttttgggtcgggttcgtctgatgccgagtgttgagatcggatgtcccgattgacccgataggggaagaacttcgggggattgtgatacatagtcgaagtttgttggcctgtttccgagtctacaatggggtagtgggtagcatattgctgcactattgagatggtgcagagtctgggttgggattcatattggacatgctcgtagcacaacgtacgccctcgatgcgaggtaggacgccatgtgaaatacaactgcatccataagatacgttgagtcaaagacattgcaaatcccaatgcagtcactttgcaaatatcaagagagatcagcatgtatcaactactagtacagagtacaggtaacaaccttcaaatgttagaaggcaacctgtactttgtgtggaggtaactcaattcaaaaaggaccgatgcaagccactggcagggatcaacggaacagatgcgcagcccgctgcactatcctaaagcccaagcttgtcaaagcggttaggtgcataagctaagactacgcgaatgcaacacgaggattgcccccaaaaaagagaacaggacaaccttccaagattggaaaatcgaatgcccctcacacaaatcccgaagtttggaggggcagcgtggcgcaacggcacagacgtcattctgcataaggcaggtgaaccgtgcagataatcttatcttgatcaagatgaagtgaaaaagtttcgtgttcaataaaaatgcatacatagaatgaagaaaaacagaagcaagtggtatctcaaaaacagcaactcccccgataaataaagagcgtcacaatggggacggggtatagaaggggccgtagactggccagaaaggtacaagaatcatataatccaacaagaatagaacatattcagtgagaatcaagatctcgaccgaacacgccgagccgtgggcgtgcaccctgcgctcatctgaagcatactctgtcgctgtccatcgtccgtgctctgtgagctgcgagtggggataccactgacgaaaggttgatccgtggtcttattagccctcgtagaggctcgtgcgggaagcttggacgaaatgggggatttgggagcaagcttgcggcggcccttggtaggtgtggaaggggcaacagcagctatggacgccgtggctgcgggaggcttgcttgtgctgcgacttccagtcttgactggagtgccagaccccagaattcccgagtcacccaaacgcctcacccggcgagagcgcggggttaaggtagcaggtgcagtagtcggggcggttgggccgctttcggtggctccactgtctgcattgtgggctgccttttgcgtttggctacggctgcttcgatgaccggactctgctttcttcgccaagcacttgcttgctggtcgcgggcgaggcgttgcgcccacgtcattcgtgcatcggtcaccctcttcatcttcctcgtccattggttctttgtactcttcatactcggccatgcgctcctcattccacgacacttgctttcggggtttggccagcccacgggagttagtatccttgtggttcgagccctcgttctggagattgtccgactgaagcccttcctcgctagactgttgagcaagagcttccagtgcgaccatgggagttacagatttgcctttgttgatccgtgtattgcgctttgtggccatagccacctgctgggactcagttcgctgttgaaaaacgaattctgttcctttggctcggcggaacgagatagtgttgcgcatactaggggtgctcgagcctttggtacgggtgcttcggcgatatgcagggcttgaaggagcttgttcttccttgatatctttggggatgatatcctctggatcatcggcgccatcgacgccacgcttggcgtcatatttactaggcgagaattgcaacttgacaggtgaaggtgaattggttgtcagttcctctaacacgcggcgtggtggtgttgagcattcaacctctgacgactcctccgggctggaagacatctccgttgatttagcatcttcgggatacgtagccttggcggcgcgcttcgcattcgccttggacaggaattcgttgagcagcgctgcgtcctctccatccaatgagcttcgtagtgccgatcgcaccaacttgatctcctgctcttgtgtcaggtcttgcacggactcggtggtggacacgacattggtcttgtcctcttctgcattgtcgaccacagtcggcgcatcttggatagatgatccagactgtagatcatgcactgtcttcgagtcggatgctgtaagatcctcgtcggtggccatagcatcgttgtagaccggcgtcttggaagtcttccacaaatcgctgcgcggctggggggacgcattggtagctacgtcgccgacaacgtctttgggcgtcccttccggctggttcgcagtgaaaccaaacacctcgttggaaccatcctcgtggatgttgaagttgaattcgggcatcttgcctgcaaattatcagataaaaggttcttctaaatgcaggactgtgggatgccatgcgccatgtgtacacggcccgcataatatagaaagcaacttacgtcgtttccgagacgcctgcatctcccatttagtctcaaggaaagaccgaccacgttgctcagcctcagtctcgcggtccgcatcagcggggtcaacacacaggcgcttcacgccgcgctgataatccgagtttttggaggcaccaattcccgaggcctgggctgctgtcgcggtattcatgccggtaaacggaaagcgaatgcgcttccacagctttcgtgtcttgtctccggcccggacaggcgtcgaaggtttgcgatcccacagtcgcggcaaagcgctcagggctttgataggcgtaaaactgaaggaactttcagtgggagggttggcagagctactggcgcgtgaggcagcttgcgttagcgacaagtctatatggcggtgtgtctcaaaataaaggggaaagagaccaaacccctgagtgagaggcgcgaatgattctcttgacacaaagagaaaaacaaatatcggatcaaaaggcagaaagaaagagttgacataccatgcctgcggcgagggaggatgattctccattgttgttgacacgcgtggaatgtgtcaaagccgttggaattcgaattggcgacgaagtatgttggagtaatttagatgaatcaaggcaagctatctaatatgacatctccaaaaaaaaaaatgcaagtcgaaagtatgtatgcaaccccctcagtaaaatgtcgaatttgtcgctgatagatgcgaaagtcatgaagcgggtggtggttttgctttgatatgccgttgacctgccgttgccctgccaactgccatgagcccaacgtggacatgccgatcacgaatgtatagaacctcattaggatatgcctatcgaagggtatccttagaaaaattgctttcacagattaatccttttttggcccttttccgctgtttatacaaattgagaaaggggcagaaaatatctataaaccagatatctacaatgaccaactgaggagagtaccccaagaaatactaccaaaaagacatataaatgactatcggggaagaccaccagactaagtggccggctattcttatagaatttcattgggaatcgtgtgatgtctgttaatgcaattgcagtcattgctatagctcgctggaagggtgaagggtttgatatatacgccgactatatatcttaacgaagactactatcctactagctaagcactgcaagaattgataacccaggaaagctcaggaatgaaagcaggctggaatcacacagtgactccgagggtttactacatctattcctctaaagctcggacaaaagcccgggcacagaatgcctttccggcaaagccatgcacaacagtggcaggaaataatactcccagatatcatggaattcgcctgaagtagctttcgtctatgctgtatgacagtgaacagaagcaatcccgcctacacattcccctcacgggtgagcaaagactgccggctcatcgtagaccaaatgtacctaaagaaccgcaagctaaagaatcaagtcgtacctcattattcatatcgtatgccgccccatgtggcacagtctccaaatatgcagagactcatagcagcttctcctccaagtcacgttcatcaaaaggatccccaaattcatctgaaaacaacctagtcagcacgctgtacagacatccacggacggagcacgacacaagctaaaccaagtagacatagaaaggccacatacctagtttgaaatccttatcaacgacatactccatcgcacgctgataatcctcttgtgcgcgcttgctcttccacgccgcaatattggagtcggaagtcttctccgcagactgtcccccgcgctgttccagcgcagtcgcaatgtcaccgacataagcaccagcttcttgctttgtctgggacccagggggagaaagctccgatacatcagcgccagctgaggaagcgtggctggtgccggtcggagtgcgggcgccgcttctagtgccgtcgtcggggcggatggactcgacggaagaggtcattgtagagtcgccgtctgggtctcttgggtctagtaggtcttgttaatggatgtagccccgagtttgtagtttgtagcaaggaagacgaggcgggcgcatatgtgggtatggagcgctatcgatatcgcgggcccactgctctctcggctacatcgtatagattcgagggagtaggggagacttaccaatcgccattgttggaaattagcaaaaatgggttagatggtcgatttgtagtttcaaaagttcgcaaacctcaaggcgcggggagtggagagatcaccggtcgacaggcggtggccccgggggctcactctcgcatgaattttcttcttctttcttccccagtctatatactgcatgaacatacaaattattgctggcctttgtgattagcatatattttcattagatttgttttcgatatccctctctattcttaatcctgctaccgtcattctctgtgcaatgaatgcaaactccggtgcagttcccgatgcctgggaggattcatgggaaagccaagccgatgtatgtaatagcaaggggtctacgtgacatttgggacagacactagtctgatattcaagtctactcaatgcttgcgaattatgaatgacatgctgatggtcatcgcttacagaaactcgactccaagcctaccccgccggccgagaagaaagtctcatccaaggtgaccaaggcgcaacgcagggcggaacaggcagagttcaatcgtcagctatgggctgaagcgtaagtttcaatcgtcaactagcgcctaccgcatttctttgggttgttcaggaggctgaactgggttgcagcgaatccacagaaacattccactttgttgaagcgcgcgccgatgttccccttaagcaagacttcaagcccgcagttacactgctgagtcggaaacctcagcttgtgacaagaaacccatcatcctcgagaacaattggtgccacaacggctggacttggccaactcggactggacgacgatgatgactcggacgaggaacccaagccgccccagccaacacccgaggagcgccatgctattgcgctgaagaatcgtgaagagaagcagcggaagtacgaagaagtgcgcgaacgtctgtttggaagcccatctgctacagcttcgggcacatcatcgcccggcagtacgaccccgcctcgtcaaactcaaacaggcgagggcagagcgagaggcaaaggacgtggcggcggaagagatcaccagaagagagattcctcgtcggcctcgagcaagtcctccaggcatctctacgatccctctacttcggccaagtcaaatgcacccttcctacaaagaggtggccgtccgcaggttgagcgaaacggctccgacaatcaagctccgcagcagccgatgcgcagtcctcgaggccctgatgcaagtgggaggggtggcttcaatttcaatcgaggtgctcgaacaggctaatgtacatttggccaataaattttcgtcccaggacactggccgtcacttaccttttttcttttgcattaagggaggcctcgtcctgcgttaattgcgtttgcgacctgggatgtgtttgggcggttctctgtgacatggagtgtgagcagtgcccttggagaggagacatgcgatactcacgggcatatcgctcatagctgtcatggtacagctcgtccgtgctggttgtcgcctgcacatgctggttggtctcgattgcattcacccaagaggccagcctggttccctcctcagcatctggccatcctcggtatggtttcagcacccgccgcagccgaatgatccacggggcagcttgaatgtccacaagggacatctgcgggcccatgaagaagggccccttgggatgcgccgcttcgagcagcttctccatcgcgtctcgcagctcctgtgtcttctcgatctgtttctgttggtcctgctcttgcagtatacggtagaaactcggcacgatatgccgattgacctggatagctatcagtggtgattaccagaacagacttcttgtctgtctacttacatgatccgcccacaaccgacaatgggcgcgcagctttgggtctgctggaagcattgtagctcccacacccaggtcctccagctgcgagggattggtcagcgaaggaaatgggaaaatgcctatttggctctcttacatattccaacaacacgctgctttcatagcatccccagtcatcgtgtcgcaaagcaggaacaagtcctcttggattcacctctaatagcgactggggcttctcatacggatccacttcgatgtactggtacgggatacctttcagttctaatgcaatccatacccgttgaacgaaggggctataaacatgcaggccaagtcaatacacaacaagctttcgtcagaacgagtcgaatctgaggggtcctcaccagaagcagctcccatatagcctgagattaacatcggcggagtgtttgatcgcagtttcagcagccaggcccgtcgcttttgtatggtatgacttttggcctgctcgagacatgattcggtcctattgtgaattcggtgttaaagctgcaaaattcaaaatgttaagaaatgggaacaaaaagaagaattgatctttgacatgtgagaacatgaagtcaatgtagacttgtgacgtaggcgggatacatgcggggacacgtcggtacaaatgaacaaaacaggatcaacataccgttctcgtccttttgtctttcttttccttcagaacatatcgttgcacactactctttttgacacggtcgctctcctcaagcgtatgttgatgaccaccacctactccgtcattcttcccgttggcaccattaccattcacccgctgtatagtgaaatatctcccaccattcgatcccggatgatttggtggtagaccagggttcggcgtgagcataccgaatgtttgggcatttcggatcgcagggtcgtcattcagagagaaagtatacatgccaggtaggatgttagatggcaagggctcgacagcatgggttgtatttgctatttcagaggatgggaagtattccacgactttgattttgacatggcagagatcccgttctctagccgtacgcttgcgcttcttcttttctgggtcatcggatttgggggttccaggcggtcgtcctttgagtcgacagtcccagtaatgggagacgaagggtttacgcttgtaccgctgtgttgagcgatgagagtatacattgtcaacgtgggggaagtatgtttggaatctgtagaaaaggatgatgcaagtcagcctcccagtagggtagaaataatcccaacaatggagtctgcatactcctcttcgctcagggtgatcatttcatcgacattgaacaacctctctctccagtagtccagatgtggagggttcggcaccaatttaaagccttgcagctctccaggcccagtgaaggccaccggatccgtagggccaggatctaacccggtaaagtccggttgaaacggttgacttgaggactgcagtgttgttaagctgttattagcttgatgcgcgttgtttcccatcgctagctcgttctgggacagcgatgctggaggcgccatttgtccagcagcagcgccatgtaatgcaccgctcatattcgctgcatgagcgatgccatcgttgtagccctgcgattgatgtataccactggagggttgcccttgcggttgtaagtgcgaggcaagtccattgctagggtggccttggtgcgattggtgctgtgtggactgagacgtggtgatgaagttggtcgcaggctcgccttgtcgcggaggacgaataaacgcatgcgtcgcgttctggagctgtgattcagcttcggtcgggggacggaatgacccgaaggtttgcgattccgggtcaaattggcccaactgtagattagactggtcatttatctgtatagaagatcccaagcggggcgacgacagtcgcagctcagagtccatcttgtaaattacataaagaagttgtggagaggcgtgctgcttttgaggagaagatggacggttgaagcggcattgtggggttaaaggaagctcggatcatcatgaggttctcaggtacaaaaatcatgcctggcctcctatgggcttctatgagttctctttttccaattggtaatgtatagcacatttatattatttcgaagattgggatattgagttacatattaccatttattcgcattgaatcgctagacgcagtattgatccccaccctctgcagcttacagacccttgccatgtttcttcgctgcttccgaattcttgaaagggaaccccgtcgtcctcttgtctgcaccgttacggcgactgattttgccgtggctgctagcaaagagcatacaccacaatccaatggccgcaatactagagtatccagcaacaccaacagcaaagagaccttgtccaccggtgacataccaggtgtacgcgtagaatgcacatgcggcatggaagatagaggtcaccatcagagttggcacagcgtatggcgccttgggatcgtcctcctctgttgtcacagactccttgatgtcggccgtcagagggatggagccggttagcatcacggtcagaacggcgatagtgagaaagctgaagccgagacatcgggcgaagtatatctccatggctttggcgaaggattagcacggcttgtaaacgggtacgcgcggcactttcaggatgtgggccacatacgggaaacaggccgagtctcatctagcagcatggtcaccatcatgctcggcccggtaatcagaggtaaactttgaagcgacaaccatgcggccgtcgagtacgtgtaggcgcgaaacacctgtgaagttagctttagctccagtttcgaaatctatcttctatagctttggagacagtaggattggctcacatccatgatggcagttcgctggtatgggttccaaatggtattgagaacttcttgctgggttcaagtggctcttggtaaagaaaaaaccagatctggagatgatgaagcttccaaaggatctttttttcaaggctgaggcattataaacaggtgacgtcatatacctggcagctagagtgccgtttgacttgtttgcaaaggtccaacctcgtgccactacatcgagacgaagggaagggtgtataagaccaaaacaatatttgattattctgttatatcgactagggtgaatgcaatgaatgaaatgcgcctctaaaaccacaaactccttaagaccgaaagagcccattggaaacaattaagacccatcaaatgttgacttctgtttcgtggaagatttcttcacttttgcatattgctcgcgcgcagataccttgtgaagctgttgtcttggtcggttggagcactttgggaacctgacagggccgcctggtaacgctgggagagaccctcatcatcgccagcgttcgggcccacgtagtcctcataatcgctgtcttccccatctgccaacccgcgcttgataatctcatcttcttcatcctcggcttcactgacagtctcaggctcttcggcaggttttctcgggggctgccggcttgacccagacacactcatgtctttcattaattttccaagttcaagctcccgctgggatgctgtctgctcttcccgctctttcttcttgcgctccaattcgggcttgtaatcacgttcaaattcctgtcgcttcgtctccacggcctcgaagaactcttcaacgccatcaccggtcattgagctgacaccaacgacgctgaggtgtcgatagaattcttccaacataagactcatgctgttcagaagggatcccatgtatccactgccagcgccaaagccaccggcaccgccttcagctccaaaggcgcctgagtcttcctcctgccgcagagcctgttggaatgcatcaaagtcagtcatccattccttggcaaactcagcatccctaacatcagtcttgttgaaaaccaagatcatggggagcttggtcttgtacaagatactgcaagcgtagagcatgttgctcataaaggtgctggtagagcttgcgcgaggggtatcgataacatatgcgatgaccgtcgggaatgatgtcgccatagtctcgagaaggatactgcctgatgcactccagacaaagacttcgatttggccgggggtgtcgactaggatgtgttcgattggctttgcggaagggttttcggggtttggagaggtgcgtttttccaagagcgaaataatttgatcaacctttgtggcgaacagatttaacgaagttaagattcctccattggggcccaggttgtattgcttcatcacttctttgtaattaatggagtcacggatatcgatgttgctctcgaagggcaccgagtgcacggcggggtcgagattgaccacatacggcacattcttcttttcatgcaaataggagttgattctttgcatgaaggtagttttgcctgagcctattcagttcataatattgacgattagatcacagcagataagtgaggggcgatcagcatatcagcattcttacctgccatgcccacgcagaccacagacaccggagatggcatggtgaaggtagtttgtaaaaagaaagattcgattaagcggaaaacagagacctctgtggttgaaatgtattgttcgagggtggaagacaagtgaagaaagataagcttcttttttctgctcgaaatcttttttgtcgcggggaaagatctacggttggaccgcccggcattttaaaaacgtcattccaacttttgccttttgctacagcttcaccccctttttcacataccaggagcaccatgactctagaagattttgagaagtcattggcagaggggagagagcagcgacaggaaaaaagcgaagggcgacatcatcgagaccgaaatcgtgatcgcgaccgaagcaaagagcgctcgagacagcaccgccatcgttccagccaccatcaccggcgacagtcctccagatctcgcgaccgggacagcgagcgagtacgtgagtcccggcatcgcgacgatgatggccaccggcacaagcgttcacgtcgttccgacgaccaaggagacgagcgtggccataaacgccatcaccggaactccaaagacgagggtgaaggtgttcctctagtggtagtacaagaggagcccaaaaatatcaaacgggacgcctggatggaggcaccctcagctctcgacgttgattatgttcatcgaccggatgcgacgcgacaggaggagccgaaaccaataatgctttcggcagactacgaactcaagatccacgacaaggagctcaacgaccatctacgtgatctcaaggatggaagaacggtcgatgaaatagaagatgagcctgcccagcatgaggtggactataccattggcgattcggggtcacaatggagaatgacgaaactcaaaggcgtatacagagaggcggaagaaagcggcagggctattgacgacattgctatcgagcgttttggcgaccttcgctcttttgatgacgctcgggaggaggaaaccgagcttgaccggcgcaacacatatggcaaggcctacgtgggcaaagataaacctagtggggagctgttccaggaaaggaaactgcaaagtgatatcagaagagacccgcgcgaacatcttcgtgatccagagcaagaactcaacgctgaaggccaaggcaagaaaatagacaccgcgcctcctccgcagaccagccgtcacctcgatatgacggcattgaatcgtctgaaagcccagatgatgaaggcaaagctcagaaaagcaccagatgccgccaatcttgaggaacagtacaatacagccgcagcagcaatgtcaaaccgcaaggaatccgatgtcgtggtccttgatgttatgcataacccgatgctagcaggcgcaaggaatgaggtcaaagccattgatactaagagaggccgggaaagaggccaggtggaagcaaatgaagatatgaccattgaggatatggtgcgagaagagcgcaaaacccgtggccaacctggcggagagggccggcggttggcggatcaaattggccgtgatgccaagtttgaggtcagtcctagagttatatgcgatgacccatgtttcccctgctaaccaatatctagaaccgtttggaatatatggacgacaatgcgtccaagctagccaaaagagtccatcgatctgagattgacctcaagaactcaacgatcaatgacttccacaagatgaaccggatattggacagctgccccctttgtcacaacgaagacaagggcacgcctccacttgccccagtggtatccctcgcgactagggtcttcctcacacttcctaccgaacccgaggtcagcgaaggaggtgctaccattgtgccaacccaacatcgcactaatttgatggaatgtgatgacgatgagtgggaagaaatccgcaacttcatgaagagtctcacgcgtatgtaccacgatcaaggtcgagatgtgatattctacgagaatgcagcccagccagagcgcaagcgacatgcatccatggaagtggtgcctttaccttacagtctaggagagacctctccagcattcttcaaagaagcaattctcagtgcagagtcggaatggtcgcagcaccgcaagcttatcgatacccttgccaaatcaaagcaagggttaggcaggtctgccttccgccgaaccctcgtgaaggagatgccctacttccacgtttggtttgaactagacggtggcttgggccatattgtggaagacagccaccgctggcctcgtggggatctctttgcccgagagatcatcggcggaatgctggatattgcgccggacgtcatcaaacgacagggacgctggaaccgcggtgaccgcagggttgaaggattcagaaagcgctggaagaagtttgactggacccgtattctcgttgaaggatagtgagcctggaattggtccctcggcgcactgtattgtacacatggccagacatttacttgaacggtagcgagtttcgttttgaaaattgcaaacgcgaagtcgccgaggtctcgtactttttcattccacacaatatcacactggactaggataaaagcactactcatagccaacatcttagaaacgggagaaaactaccgcagtccctacgatgtacgaacaaaatatcctcgaccaacgctcggctgcgatacactccgaagcagctcaagaccttagagacgacggggttcctcacgactcggacgatgagcccatggtctacgagattcccgtagactgcgcggctttgtcacgccaggagcgcgaccgcctcatcgccgagggcgccaatcctgcttccgtcatcctccaaagcgaactacataatcatatcatacgacgagagggcaagtctgttggcgactatatgaagcgttactctgatgatatgaacgccatgattcgtcgcggcgtttctattctgaatgatctgcttactgctgatatggtgccatccggattccgaaccgaagatggaaggtttttcgatttgggcccggaatctggcgcgacgaagggggagtatcgagaatttggtcagtggctcttggaggtatcggatagcaggacagacatatgagctgccggagaagtggttgaagtttgagaagccagcgggggatttgaattatgacagcggggatgggccatgatggtatgtagaagacggggaactgcccgataagcgcggggcactttttctccttgtcggtcgatgcttagtataagaaatgaaattatggctcttattaacttaaatttgtctattttctataccttgggatctagtgtcttcgtactctcttgaacaagtagctcaattggcgcctcgatcggacatcggccctaagcttgcttatcggtaagttcagacatgtcaagagaaggcgtcggaatactttgacccgaagaattggagggagaatttcttggaattgactcactgctcaaatcactaactgtctcgcttaacacagaatcatctactatcaataacatcacaatgagttctaccggccccaagcctaaggttctacaagtcggtaatatcaatcagtatgttcacccccattcctttgcaccattgatgtccgttccatgatattaacattcttcaaaccagtgcgcagacagcctggagtgcattgggcgaaatggcagagctagttgaatcagcggcaaccaacagagctgagttcatccaagagtgcaaggatggaaagctagatggagttgttgcgatataccgaacaattggctctgtggtccaaacagggcttgtagacgaggagctattgaatgtgctaccaagctcactccgatatatcgcgcactgtggtacgtggagcttgagatgcgagtactcaaacgtttatatgctgagatggagcctctgtaggagccggatatgaccaagtggatgttcatgcctgcagtgcacgcaaccccgcggtccgggtctccaatgtccccactgcagtggacgatgccactgctgacgtgaacatgttcctcatccttggcgcattgcgcaacttcaacaccggtatgaacgccctgcgtgagggtaaatggcgtggccagccagcacctcctctcggccatgatccccaaggaaaggttcttggaattctcggaatgggtggtattggacgtaatttgaagaagaaggcagaagcctttgggatgaaggtcatctatcataatcgccgcaagctcagtgatgagatgtctgcgggtgctcaatatgtttcttttgatgagctcttgtccaccagtgacgtggttagcttgaacctgccattgaatgtaagtgattcccattttcaaaggaaaacgaactatgttctgatactaatttgcttgaagaaaaacacacgccatatcatcggcaaagccgagttcaataagatgaaggacggcgtggtagttgtcaacactgcccgcggtgctgtgatggacgaggctgccctggttgatgctctggatagtggtaaagtgttctcagctgggctcgacgtttttgaggaagagcctcggattcatcctgggctgctcagtaaccagaatgtaatgctggttccccatatgggcacttggaccagtgaggtaagttatatatcttcccataaagatattataaaactgacttgccaaaagacaatgctcgcaatggaagaatggacaattgggaacatccgtatggctcttgaagttggaaagctgaagagcccagttccggaacaggcggacctttgaactgtattgggcaggttaactccgaggtcatagcatagtacattatatagggaaatgacccttgatcttcgagatcatccaagactaagctctgacttgacttgagcagtgagagaggtatactaaagaaatgaatagttagagttcctggctaggtactctgtataaataaatatgtcagtgcttttcaacagacaccgcatccggagtttatgaatatgtctcacttacagtagaatttagtatttttcttcatccgatcactgacatagtagtatcaggaagattcaaataggaagatatagttagagagctgtgtagttaccttgtacattgtaggtaaagggaagtccctattggccaacaaagtggggccaactacgtaggtagttttctgccaggcaatacgatcatagtctgaatcaaccctatcttattgcccagcactccatcatggctgaattctggaaatcagcagtaagtgtgtatatttacccgtctacaaccccgctaaccatttcacagccgcgctactggtgcaagcagtgcaaggtcttcatccgtgacacgcccttcgaaaagacccaacacgaagctagcccaaaacatcaaggcagcctcaagcgcttcctgagacaaatccacaatgacaatgaacaaaaacaaagagactcacagctcgcaaaagccgaagtcgaacgactgcgaaaggccgtcggtggcgggtcctccactgacaaagacagtgcgaaaggaaaggcaccacccccagcccccaaatccgcagagcggcctgcttccctagaggaccgaaagaaacagatagcacagctggcggcaatgggagtcgccgtcccccaggagttccgcgccgatatggccatagcgggggattggcagacgacatcagagacagtcatcgaggtcaagcagggattagacggccccacaaagtcagttggaatacgcaagcgcaaacttgaaggcgaagaggagggggatgagcatgcgcctgaacctattgtcaacaaaggttggggctcgaggatgaggcagtaccccggtgcacaagaagaagaaggcctggatgacctgcttgcatccaccaaagatatcaagaggacaaaaaccttcaccccgaaagtcgaacttgatgagcaggagacagccaccgaacccaccgaacccaccgaacccaccgccccaaccataaagacagaagatgatcccaccaagccagaggcccaagagacgaatgggccagttacggtcaagactgaagagcccgctcaatccttagtagagcctgtcattcaagagaagccacagagggaagatgctgcgcccggtgtcgtcttcaagaaacgcaagccgaaggcaatgaggaaataatcacaccttgagaggatgtgtgtatccacaaaacttccttgtcatggctcaaattgagatgcccatgtgcttgatcatctcaactgcccgtggggccttatacatccgactccaatccgttggccgtggcccatggccctgcaagtctgcaagtctgtaactgtgttgcttcaagcaaaaggcacacaattttacggccttctctgtgccaaacgatgccagagatggaccaaattcttcgacaaaagacttgtggcagaattcccgctccacaggatgtacacatcggtcccattcatccagaggaccatttgcaagcctaagcttactgcgttgacagcctgtcttcaaatgaaaacccccaattcattggtacacatgcaaatttgaagcatgaacctttggttatgtatcgttgaatcatgccatgccttttcccaggacaatctatagctttcacggatttcgtcccttaattttgactagaacggctgagtgcaacactattaattcaagcctattaattgaatttaagataagacataatatcggcaaaatattcacaaaactaataaaccaagtgtagatgtaaataaagccaagtataaaacctcggaatatagccatgttggggtagaaagcggtgtttgccactataattttttttcccttcacaatcaaagcggagagtttcaacgccggaaaggaaagctccttaagcctctctttcgccctttgcctgaccgacgtccctcgcatttgcatagtctccttgcgatttgtgtttctgtcgatctaaatatacaaatctatttacctggtaagccttcgaatttcgagcatgtcgtgatccccgcagccctgccaatccctcgacatgcgcatctcgcgccggagcctcaccctgtgcgataccgtgttcagtattcccattgccaaacgaggtcattgtgtgctggattctaccttgtgatgctattacgtgaccccgtggcattgtgaacagaaggttgcattcgaggctggtcggccactgcgaatgcgacctacaaaacctcaattgaccaggatatctggacatgccacgaggtgtctatatcatcgatatagaaaaatccgtacaaatgcacggtccttgcgctcagtgctatgtcctacgcatggtttattcgccgatcggacctaaagacgtggaaaacggagggcctgcgctagcatggcgcttcgttcctggcgatactcatgatcgacaccgaggactctgcctttaccgcgccttagcactctccgctgcagagcactcacgatattgctggtcgaatattttggctaacgaatgctggaccccgcagaccatagggaataaatgatttctaactccccatccgttcgacctggtgtgatttcttcgctccgccgcaaaccagacgacctttgaccttgcctactcgaatactcgaatactcgacctttactcaagaccttgtcttcgaagcctacttgcaaaatacctaccagttttcccatccgatccatactttcattgggactgcgaattccaatatggcggagccgacggactcgagcgccccgcctggcgaatccaccaatcctgcgaccgaaccgaatgcgccagctgttgagacagcacaacctttagcccagaatgagccgcccccagtgggaacaaaccaacccccaatggaaacaagccaagaaccggtagcgccgccagcacaaccagctcaatcagcacaaccagcaccgtcagaagcgccggtcgaacgaacagcatcagaggcgcaaccaataccagaagtgccacgaacatcagatgtaccagccacaccagaagtgccaacagaaccaaattcgtccaccgcgggcccttcacacgatgcgaacacgtatcagccagaagaagtcacccagccagcacgaggtccagatgtgactttaccgtctgttgaatcatcacttccagcgattgatccatctcttccagcaatggacacatcaaatggctttgatgattcagaattgcactcctttgatgcgttgccttcaataggttcatctgcgccccacgatatgtcactgcctgccattgatacaagcctcccctctctcgaccactccttgccagcgattggaaccgatgatatcccaacaatggatggccatgattttggcgacaatagtcatttggatcatcacaattcgaacgccggcatggcagactctacgggtgggcatgacaacggggatgtgaatggtgcatctgattatcatgcgaccaatggttcgtaccaatattcgcatagtcctgctcaatcacaacaaccaggaagccagcagtcaccgcaagcgcatacccaccagtttcaggcacagccgcaacactatcagcaaaacgacatgtatcacaattccggttcccaaggacaggtgccacaggcaccgattggatcgccgctcccaaacaatatgcctccaatggcttctatggggcaatacatggctggatatccttccaacatggggaatgcgcaaatgcgatatcagctcccgggtgacccgaacaagatgttgtcaggcaatagacacaagaaagaagtcaagcgacgcacaaaaaccggttgtttgacttgtcgcaaacgaagaatcaaggtaagcgcaaagtagttttcgcggggcggactctcgcttgtgcccgccagaccccgccatttattttgtccgcttaaatccacctccctctcaatctccaacttttttatttttccattcggctttttttttggaatatttgggatattttcaacttctaactctcttttagtgtgacgaagcacacccggtctgcagaaattgcgtgaaaagcaaacgtgaatgtttaggttacgatcctgtgtttcggactcaagcatctacaccatcggctatccaaccagcccctaacccaccaccttcgctggttgtcaatccccagggcccttctacttcatcaacaccttcatatccttcatacccttctgcgcctcccgggtacatgcccgcgtcgtctcagccattcgcaccttcccttcactccgaatcgcccactgcgtctgccgaccaacacgatcacgcagcttccattgattcttctttggctacggcccatccatccagtcatacagaaatgcagaacgccggtgtacaacgtcaacagggccccgacccttcatacaaaggtgagttcatattattggttttctgaatctccgcattgcagtatttcgcatgggtagctaacaatcactctccaaagccaaaaacctctatatcaatgacctcttctctttgagaggaatcgcccctcctcctccccaccccgtcggagctcttccacccggccgtctcgaagagatccaggcagttttcctggccacctacgcacctgcaattgacaagcttcttgaggttcgctggtattcagagaatgctctctcattcctcatggccgattctcagcttatggcagattattcggccttgatcatcgcgttcaatgagtgggatcttcaagacggtgaaactcttgctcgtctagagagtttcgaggcctcgatcatctggaaaagcatgtcgttatgtcgtcaggtaccggatggggaaactggacaacaggggcgagactggaatctctgtgtgtcttgcgcccgattaaacgtaatcgaggcattgcttacttggaaccacctggactcaaacccgttgtcgcgggagctggtcatggatgccgctaatcccccgaacacaccagatcagttccagaaccgccaattggatttctgggaccaggttggagaattcctcacactctacgacaacgaagcaagctcggccaagcagatcgacgacactctgggtcggtgtcgacagttgctggacacatacgagaaccgtgacattatctactccatctctgtcgcacgtcacttgggacagcgctgggctgacttccccaacagcctgcccaaggtcggctacaccaccgagaaagaggcgggaaccaggctttttgtcgcacagaagttcctcgaagaagaagccgagggcaagggcacaactcaggtctacaagcgagtttgctgtatggcagtccgctcatggtgggtcgctcgcgggtaatccactctattgtgaccaagatcgcttctaagcgtctgcaatgcccttcatactctttcattactccttgcataatgagttcctaaccaagggccattacaccctctcgatcctgcgtcctcacggggttttcatcttgttcttttgcggtcgacaaaacaaaagcatcatggtcaggcgttatgtttcttttgctctgaatgatacgatctcaatctctgccagtttacatctcttttcctttcttttttttttttctattgggggcttaggggattggccaatgagcgagcaaagcactacggcgttttggccttttcttccccctaacatgtggaatcatgatgattctacctgtcttgtgtacatatagaccggataatgtctgtcagttgaaatccttttgtcgttcttttacgtcttactaggatctggttaacaagtaaaacatcatttcacctgatatacaatctgatcggacaatattagaaaagctaggccttttattcagctcactctagatgttttatacgttacctacatagccttagtctcacttccaaggttggacatgtgcgtagccatcgcaccttcctatttatacctaggtagagtaccttcctaaacagttagaacttggattctgtcaacatccccatctcctctcacctctttccctcttcctctcttcctctcttcctctttgtatatataaatatatattggagattatatatgttttccccttcaaggtttctatgaaacattttttctggcatggctatactgccttccaagctaaatggaatggccacgctacatccagaatgactgatgtatgtgtctttgcgcatctaccgaaccacacagaagccttactggatcgatcgctcgcatccatcggttagccgaagagcgggcatcattatggccatagcccaggctcggccgggaaaagctgacattggagactgtcaagacatccatgttactctggctccagcgtaaaggcctgacgacacagacgttggagcagattgacgagaacgccggctctctcacacggggatctcgatgataagtatcttcattcgttgctttgcagatctccagtcacccacacggctcgaagcgcatctgaaagctcctccgctcgaaaaatgcctgcacaacggagacagttacactatctgtttgcattttccatttactttctcttatccatacatctactatactcttttaccatacctacctacgtccaaacgctagtatggcaaacctagttgtccacccgggccttgggccaacacagcacttcgacaaccctgccaatgcagcagccgtgaatcctgaactgttgcgccatcgttgtcggttagcttggtatgtaaagcggcttcgaaaccggtacatgttggtgacgagcacggcgtacaaggatgcttccaaaagagagttggccagattcttagccacgtcgcccaccgacgaacgcgatctacttcccttcccttggcatgtcgcaggccgtcgagagccacagaccgcaaaatatttgtacatcgggcaagatcagcgcattctgcgactatccgctcaacatgaggcgccccgcttcatgtttggtgacgcgaaatgtgcgccgactggatcatcatgactgcaggtgatgatccaatcgtggtgggcgagataaaggtcccatgggtagccgaccaccagatctatagaacagacgctttttggagcgatgccgagaagaacatctggctctagggcagatgttactggattgtcgacggtacttgacaatcagccgctgacccgggacgagtatctacaaaatgtagcgacccagcctatgtccttgaactccgatcccgaggcgtggtcccatcgacagagaaggtacccaccagagacctaccagacgaagtcgaaaccgctgaatctaccctcgttgctgaatctcagacacttgatgttgcgtcaaggtcgcattatatcatcccgttccatcacgaaagcgaactcctagagcttgacgggcgtgagtttacctcctgggccgatacgtatgggcactgtcgggcctgccacatccaacccgacgatcgctacggccgtgatgtcgacgacaccccagaggacctgtttgaatatatttgattctctgcttactgtttttacaattgggcaaattcatagatcaattctgttaacattcacacatactacagatcttgaccaaatgttctaagcgtagaatgactatcatcccagaggactacctcatagaggcataatcaagtatctcaacccgaatcctaacctctccaacttcaccctgaaacaagaacccaacatccctcgttgaatcaaccagctccacctccctacgcaaaaatcggctcttatcgagaccatcggccattgcctcaagcccagaatgaatatcaggtcgagcctcatcctcgctatcgtcatcccattcaacgacctcctcgccaacttctttctccaccggatcccactcatccgtctcccaaactagccggaacccaaacgccggtagcccgaagagccgcgacaccagtgccttgacctggtaagtatcaaacgagccagggatctccttgacttggatattggattcgtcatttccgagtggcagacagaacgccatcttgacgagtcgcgctgctacggaccgcggatggatgactctcgcatccgaggaacccgatacaactgctcttgtgatagtcggctcgacgtatagctcgcacagctcgctataccgcgggtgcgtagcgagaatggcgggttcttcttccacggtcgtggcggagagttctttgccgatgagggataggtagtacatctctgcgttggagcggtcttgtggtgagatggcgctgtagttcagggtcgtgagggagggtgggaagcgagatagggttagcatgaaggcttcgtcgacggtcattggtttggaggcttctgtgacagatggtgggaggggtggttggtcgaagagggggtttgcggtgattcggagggtggttaaacctgggaagaccgtcgggattgtatttagaatggtccaggagttgatgttgttgcgggatagatcgagggagcggagagttggcgggaattggaagtctggagttgtgtctgtggtgttttggttcgcggtgctgatgctgttcccacgaacggagaggtgctccaaacttggaagtgcggcgagatgtcgaagagctgatattgaggtcatctcattgtgctcgagggttaatgttgtgatagtgctaggaagtggacaggttatctcagagagctggttcgcagatgctgtgagagatgtcaagtcagggaatcgacatgcaatggcagctatctatgtccgaagttagttttgctcaagattatctgtaatgggtggagcacatacttcatcccagctaagcagggtttcctctaaatgtagctcagtgatcccattgaaggccaggccatcctccaacgcttgaaaccggtttccgctgttctccagtcagctctactattgatgagatgaccaatgacacttacttcaacttcagccgtttcaagtgtttaagctgattgcaaatatcccaaacatcccgccatcgactcaacaagcttcgactgagatcaagttccgtgatcttgggacaagtctcaccaatcttctgtactgcctcactatgtgagatttgatcctggtcgtaggatgcgaggaccccgacaacccgtaagccatcaagcaagacaatgcgtaactcttggagctcggcaagctgtttccgaattttgtcaaagccaacttcttcaacaaccttgccgctgatttgaattgccttgccttgaaccgctgctccacggtccaaggtatttctggtaaggttgttctcggattcagaagcatacttctcccgtagggcttctaggaagcttaaaggctggtctgaaggcctggaggggcgaacaaaagaccccgccgtgggatgtttgcttttgcctgaagcctggttagcaataatcctgttctataagtgagatattcttacaggagaagtatctgacgcctttatgctctccagagtgcttgcctcgacttccatcgtcccattcgactcctaaccaatcaccgctggtcccttggacagtgcccacataacgaatagtacataagtgaccatcaaacgaccgtcgttggcctacaattgggacactcatagcgcaagccagacctaacaggtcaattgttcaagtgttttggtgagagctactttgtgctgtgatccatgatatcgcccaaacagccagcttatataatcaacgggatttcacctggacagacctgacgttgatggctgaagaccaggcacattccttgtaatactagacagaacaccgcatatataatatgtgaagcctcaatacagctagcaatcctttttggggggttttcttacaaaaacaagctgatgaagagacgtatccttgtatacaaagtaaagcagtatctctactaggaaggcggtcgatgctgatgctatagtcaaatactttggaggtcccaattatgagttccttagattgggaaacaaaagctaagacggtattttaatgactgattaaccttggaaccataactagataattctatgataaagcatgaagagctagatatggactaagcaccaaggccacagccatagtactaattgcggtagttgatggttctatattaactacgataggaaggcggtctatgcctgcagataccgccttcgcaaaacaccttatcgtaaactccaccaactttcttccaagttacagcgccgacaagatggattaccaggtacgtacgccctgacctggtgcattgccatactctttatctagaagcagacgaagctaacactttccccagaaccgagcaggctccaaattcggcggcggcggtgtcgcctccaaatccgccaccaatgccgaccgacgcgagcggctgcgcaagctcgccatggaaacaatcgacatcgaaaaagacccctatatcttcaagaaccacctgggcacattcgagtgccgactatgcctgacagtacaccagaacgacggctcgtacctcgcccacacgcagggacgcaagcaccaaacgaacctcgcccggcgagcggcgcgcgaggcgcgcgaaggcaaggcccaggatggaactatgcccggcgttgcaggagtgcaggtcaagaagcagctgatcaagattggccggcccggatacaaaatcaccaagattttggaccctctgacacgccagcagggcttgctgttccagctgcagttccaggagatcacgcctggtgttacgccccgtgtgcgcttcatgtcagctttcgagcagcaggttgagacgcccgataataagtaccagtacttggttgttgctgcggagccttaccagacttgtgcgtttaagctgcaggctagggaaattgatcgccgggatgaacgctactggacttggttcgatgaggatagcaaggagttctggattcaggttatgtttaagactgagcgggaggaaatcttcagtggtgtgcctggtctagcgcccatgcaggcctgaaatttttgctgtgattccccttaagttttctaatgtgatgcccctattgctcatttatctgtcttgctctgcttttcttccagacatgcatcaaaaaatggcgggatcaggaaaggcgtttcggggttattgctatttagtttttatctgattctccagcgactcgctttcaacatgccgaccacagtactttgaatgtttcttacctaggtatagtcctgttattactcagtcatagcattgcccggccctggaggtggacaactagtcaaatcattacttgcggccgaggcactaacatgcattgcactcgttgttttacggtctcaaagcgcattcggctgtgaatccgccgagcgtatgaagatcgtgtatggtgaaaagagcggatacagtcagaaaagacaagtgcattttaaattttttaagggtaatatcctgactatcctaaaatcagctgggtctccccgaagagacaaatagtgtgtgtatcgtcttatgaaggatgcaaggcgttagatacatatgtatcgacaagtgaaaccgaagacgggtcatgatttgaaaataacatcgcgctgatatgctcaatgataatgtgtaacgaggtgaaaacaaaatcgagtctttttctgaccgacaaaagaaaaaatcattgagggacaaaggatgcaagccctgcttgcttccattacccccaagaaccgatcagtctcgggacacaacaaacctaactggtttggaaggcattgaaggccttataggtgtagccgatgaatggcaaactcatctcggcttcctgtgagtccggcatggcacgggcctgggcgcggtggatcgcgctggtatcctcctggggaatctcatcaatggggaagtacgacacatcgatgttcgagctgaggcgcggctcgaagggagcacggatgccgcgaagttggtcccaaacgacacccctgaagaaggggtggtttttgatctgtgtcgcgcctccgtgctgaccaccttcgctgccaatacggtgatccgggtcacacaagaaactagacaattcagttaatgggtgatccttttaggttttggatagacacataagaacttaccttcggatcagcgcctcagagtcacgcgaaaggaccagttcatcagggaagtacaagcactctctccagttgacgattttccggtaggtatcattcgtgtcttcagcacagaacggaggccaacccacgagacattcgaacatgatagcaccgacagaccaccaatcgcagagataagtgtagccttggccgttgaaaatctcaggagcaatataatcaggagtaccaacagtcgaataggccatggcacgacgggactttcgccaggtgttgatttgaccacggttggatactgtcagattaatggcatcattgaagtatccagaattgcggttccgatccttggaagtagagttcttgagaaggttctggtagtaagcgttgtcatgggttttcttgcctccggttgacagaccgaagtcagtgagcttgacgtgtccaccgcggtcaagcaagatgttgtcaggttttatatcactgccaaagaaagattcattagtatgggatgtcttttacgctggcatatgcaccttactcctcattagagagagagggagaggaaaaatgcacaggccaatgtcctcgcaataaaaaaccaaataccacttaccgatgaaggaaaccaagcttgtgtacggcctcaatggccatcacgacctcagccatataaaaccgtgtgatatcttcagagaagatctcgtacttgatcaacatggtcatcaaatcaccaccgggcaaaaactccatcagcaggtaaaggtacgcagcatcctggaacgatgcgtgaagcttcacaagccaaggattatccttcgaatccgccagaatatcacgctcggcacggacgtgagctaattgatccttcttgaacatttcggtcttgatcaacgacttgagggcgtaaatcttgccgtcagtcttgcgctgcacgagcttgacctcaccgaaagcaccttttccgataatcttgatggtctggaaattcgccggtgtctcctttgtgcgcaggaaccgaaggaagtcggactctctcttggcaatcccgtcggcatcctggcgcttcttttcgacgggaatactgggctcacggattgtcttgtcaagttccgccgatctgtaggggcgaacataataggcgtaagccacaagtccagaacaagattccagggcttccatttgggacatggatacttaccgcatgttacggtcacgggcccgttcgatattctcgtggaagaacacagtcaccagctcctttgctgccttgcctcgcttgtgcacattctcggagtaccgatccgggaagcgttgcaactcttcgttctcggggattggacgagggctgcggggcacgggggggatcaagtgtgatgcttgggcctgtgtttgagcgggggagccaccggcggtgcgaggccgctgggctggtgaagcagcgcgattattgaaaaaccctgcacggttcgcgttgaggtcctggttggaaaattgctggatcaaaccgttggtgccgtcagggtagccggggcgtgcttggtaggcgggctggggcgattgcaacgcttgctgttgcgcgtactgctgctgctgttgctgctgttggacatactgcggatgtacctgttggggtgggtaatggttgggcataaaataacccggggcgtaagctggattggaggggtcgacgtagtcctgggccccctgagtctgatagatgggctgggggaaggcggagggggtagtgggataggcgcggttattggcgttgtagttacggtcatagccgtaattcatgttgttgcgattgttattgttgggatccatcttgactcgaactcccaagggacttttcaaggtaaaggggggagggggaagaaggttgggagggagaaagttgaggacgagggcggggagttcaaagaagcggtggctcaggaggcaatctagccccagcgtgactggttaactattgtttacatgttacatgttcacaccactactgctgacctgaaacaactgtgtgtgttccaaatgtttgtgatactcttctttttgtctaatgatttgctaaaccaggcagctaaacagatcgagggagggaattactggtgtgctaatggactaatatcgatattttgtaaggtgagaactgattttacatgcatattctgcacgtactatccagtagatcacagatctccgggccagccctcgaagatcactggaatccagagtattgtgtacggagtagctagcggttttctgcaacttccaggcttcctctttcccatttcgtccacggctcatgccgcttttaccagagcccctgagcgtgatatggtcacgtgagtagctcagtcagcgtaagtggtcccgtggggaaacccagccctacctgcggaccaactcttgatttttgatctttcccaagggtgatattccatgtgagaagcaactcctgccaaacaattggtacaaggcctgctttcctgacgaagtcatgactgtggtcgatgaacttctcaagtaaaggggcgacaactgcgatgttcttagagttgacggtgtcatccagaaggcagtcgctactttcaatctcgtctccgccggtatgggaatatgccgaatatggggagagtctgggcagcacatcatcgaacagtttggtgacaaaatcgtatactggcgtagagttaagcttgagttgtccgcaagggggttccgagcaataatcatgcatgactgttgacggaatgcggtgatgagctctggatatgcgaacgcaatggatgttgtgtggcgaggaatatctatctcgatgataacttcaataccacgatagattccgtagatctggatatcttcaatatcttgaggcgcgtaggatagtcgggtctgacatgcgcctttctgggatagctctggtagtgcggcgatatctaagggccaaggctttaaatcggtcatacggatgtggaaatggttggatttattcctggagagggcatcaacggtccggagggtgtgctatttggggtaccagtttctggaaacgtccaagtccaagcacgaggtctcaaggcaacattttctgaagcaaaacggcttaaagcaaatttcgaattcttaactaaacatccagttcgcgtataggcccagcactggcatcggataaccaacctggcacttctgtaattctcagtccaattcgcgtagctgtctgtccttcctccactgcttcaggtcaaaagtaccctcccgaagctcatcctgtcggccattccacatgaaagaaactccctcgatagttttttcagtgttaccgtcattattcagaacgttaatcaagcaagctcgaagatgatatttatccgtttcgtaggcggcaagtcgatcaagttacgccggcgataagaggccacacaccattccatcgactggatgaagtggtttatcatcgacgagagcagggtatggcccccaaagtttgatttcgtaaccagtaatcctagcagggcgcattataggtagtggctttgacgatcgtaagactttggataatatatctggatccattaatgtcccgtagaagaagcaatatttgtctcggatagggtcttgaggccaggaatcctcggcagagttgtcagatgagggcaacaacgacgggcttggcgggtctgctgaggtattgtcgcgaatgaacttgcgggctgtaggggacggccgggtgttgcgcattatgtcaatatagatctcgacggggagaggattaaggaaagcaaatgataggggaaagaaggaaattggtggagtgttgctatacatgtatacatatccgtctgcctacctaggtactcaaggtaactcgtaagattacgtcatgccagtacactgcccaggtgcccaggtgtgtgcatatccatatattatctatatagttacctagataggtattatgtatagttatatataatccgtactgccaacagtattccaggaagggaagtttcaaggagtgggtccatgaaatcagacccacttgttaatctatacttgctcgatcattaccactggttatatcctaatcaacggtgttgtaagagaagacagttgggcgatgtatatatagcctagcaaataatctggtccccaatacgagcaggttgttgctacaagacaggaaggccaacagaatatcttgacatgcgatctaactctacaatgatcttcttattcccatttcttcatcaaagtattgccctcaatctcctccgcaaaattgacaagatgagttgagtggcaccaaggcttaatggattcctccttccgaatagtacgggcgaagaattcactccagagcaggcggggatgggccttgacaacttcttcccgagttgccggatgaaccatgttctcaaaattcctcacatgtggatgaacgctggtattgtcataggtcgtagctaactggattaactgaccaatgtaggtgatggtgccgtcaactcccatatcctcgtggcggatgatcgcttcggcgacggcttcggcttgatcggaagttgcaccgaagtccttcgaaacttgcaacgccttgataccaccatatatatcgaaagacatccgagtcgcagtcaggttctcttcagcagtgcccaaatcgtgcagcaaggtagtcaaggcccaagtgctggggctaagtttggcgaagatgtccggaaaatgcagcttggtgattgccatgcctggataggagtgagtatagtgccttggtatatttcagtttccattatagtacacaccatagtagtaaactctcattgaatggctaagggtctcgtgatgaaggacccgtttcacgtagtctagtgtcttcgcgactgcagaatcatcatatggaaacgggatctgatcaagcgaaagtggttcaggttcattgatcaaacgttgttcattgaagatagcgccagcgttagctggtacgctggtccagccattaagagcggtctcgccttgacacatttttgcttgaggatggaaaaaaccgaagtggattggaagagtactgcaaggtctatcaatctcttatagatgattacctgcggaccagaaacccaaatcagccgaaatataagtcaagcaacgtaattttaagggacaagcgggacaagccggaattcccgggaacatttgaagccgaatgtcgttggacctccgaaataggaagttgcattacgtggggcgattagaggcaaccttatcgtgtacatccactgggcatggatatggacggagtgaatcaatgaaacacccttatgcactcaactcaagtaaacatcctaaataggatgcatgcaggagacactggtcttgcgtatctctctaagtcatcatattaccgataaggaattggatcacaaatggaaatacaaaataagtaatacgagaatggtgtagtgagtaactataaaagcatctcatttgcgtgatgagactagtctgttgactctttttctataccggggtgaaaccattgaagtgaccatattacagcgatatcacgccaatggcatctacaaagttcaacattcctctgtatcccacatgggacgaccatgttacctatctattcagtcggccgttctggatagtcgattcagaccctgaggctgttggtcgacattggatttcgcaaatgcacgactatagcccttccgctcccaagcatctccacttggacctctcttccctggagtctgtcaaatccaatgttgtgaccatttaccaacacctccgctcccgctccatgccaatcaccaagaacccaaatcacttctggccggaagaggctttggagataatgcgtctatgggcaaaccaaggctttcggaaatccggcgaagattctcttaaacgccaggaagtgatcccagaagcgaaggatccgaagatgcagctgaggattaggaaagatattcttctcttgtcggaagaagagattcaagcctatcgggagaagttggacgatatcctgaaagttcgatcattaaacagcccatggcaggagctcgggctgcttcgtatgtcttccttggaagttgaagttttctagaaaggtgcaggtactaacaaactcctcagatgccgagtggtgcctccactaccaggaagcttttgtgttttggcaccgcgcatacttgaaatacgtggaggaactgattgatttccctatcccctactggaatggatttgctgcagaatcaagtgacccctcttcttccaacgctggtataccatcgatctttttggatgaattctacgttcactccagtggtgagacacggaagaatccgttgaaatatgctttctccttgaatggtaccaacaagtcgggcacatctccatatgtggagcgttaccaggagctggttgatggtcgaagcaaccccaagtggagtgaaaaagtcggcatgttcgctctataccatcgacaaatcgcgaatgcgttgagtcagaaggaattctctctccaacaagggcatggttatccatggggcaatattcctgatttctccgaaaatcaaccagatagcctgtatcccacaagtgcacgtcagtattttgatgggctttttgaacaggttcatgataattatcatggttggatcgggcccgatatggttggttgattcattttcccagcgaagataggactgacccttaataggctgataactcctatactgccttcgatcctatattcctcagttatcatgcaaacatggatcgcattgcagaaatctacctccgcactggtcacggacgccgattttcgtccaacttccctcttcgccctttcgtggataacgcatccgctctcgcatacgatgagtcgagggagtatcggtataccaccttgggggacatggcaaagcccactcgggcgatgcggtacttgtacgacccgccgaaatcaccggatttcttcttcatttctgaggatcttcggagcgcagccgtttcaactggtgggatggccgtatccatgtcagcagagaaacaaacgaacgggctaaaaccagaaactgaactccgggtttatcggccagggcatacaccttatgttgttttctgcgggatatcctgcctgcaagagacctatgtaattgacgttttcgtttcccaggcttgcgatcttgagcctgtaccgaaaaacggggattatgttggacgggtgacaaggcttgggatgggtaagggaagaggcgaaaagagtggaattcgcaacccccaaagatgtcaaaagacacctataacgagaattttggatgccacagattttgcagaagatctacaccaaaagggcatcatacagatcgtcactgagctccatacaggaaggcgcgtcgatgaaagtgaatggagaaaaatgcccggcttcgagggtaaaatcatatggctttcaaagggagtgaactagggtacgtttttggttggaactgcagtttaaaataaaatagtttaagcttgaattcattaggcttgccctaacctatacagattccaacgttgtaaaactcctacgttccctagcaatacatgtaccaaaaagcttcgggcgcagagcaaagggtaaaaagagtgtactttgtaaaaagcagcaaattatctggctcatcatgcatcagatgctagagctgttattttatagtgtctcccacgtggtagttgttcccagatgttccaagggtggcttcgtgaaagacgctgtttgtctcgtacctacatgtaggtaggcctagcatcctactgctatttactatatagaaagttacgtatataatgacagtataggaacgtgtatttctggctgatattagctatttacacattgctgaaataattaaggtgtaaatatatacatgcatgtatgttagattgtgtgcaccttttgtatctcattactacgcaaaagatacccaatcttgaacgatttgctatcttgccatctggtgcaccacaccaggtaatgggtgttcgcggcttgccacgactgtttggcgatgatcatactctacattctgataccttcgcacacgtgtctagccatcttttgtgctgtcccagcttaccatccactgttgcagagcgaaggggtcctctagtctctgtgcaaagaacgtcagtttctgctttcaaaaaaaagggatgatttcccgtggtaagcatacagtcctacaagggcgtcatgtcgtgttgttcggcagtccttgtacgattcacatagataattgaggtacgcctgcaaggtctaaattaagagattagagcagaaaaccaaggagccaaggcgaagaccttaagatgatatctacgtttcaagtctcaaatgagtcgaacccgacgatctggcttgggcgacttgtatataaagtcacgtgggacgggataaggtaatcccgaggcaacaattttccccgaacgagcacgcccccggatgtactttatttatacatatagaccatttctccattgtacaacccaatggcagactcctcgagctctgctgcgccctcgggcgccggcaagccccaggcagcctcgaagccgcctaacccagcattcaaaatgatgggtacatttctgttccccagattttaacggtccaaaaatactaatactgctgtgatcaacaggcctccctaatatgcgtttcaaactgccctctcgcaattggatgatcttcctcactattactggatcattcactggtgctcttatatacgatcgtcgggagaagcgtcgcgtgcaacaaaagtggtcggagctcgtggctcacatttcgaaggaatctctgccaatcgaccaaatgcgccggaaaatgacggtttacctggctgcgccaccgggagatggcctgcgtgtggcccgggatcacttcaaggaatatgtcaagcctatcctagtggccgcggccttggactacacggtggtcgaagggcgacgtgaaggcgacgtgagagccaccacggcggaaaacatccgcaagctgcgccgaaaggccggagagcccagctcagccgctgaagaggtcggtgtggatgcagtcgttgccgctacccgcgcacacatcggggtcactgacgaaccgggccccaagggtgacctggtcatcggccgacacacatggaaggagtatatccgaggcttacacgagggctggctcggccccttggatgcaccacctccgcctccggagaagttgaccgcggatacatcgaaggacgtcagtgcggaaaaacccgctagtctcgcgaaccccgaaattgagagcatcgattcgcccgagttctctgaagacaaaaaagacgagatcccagagcctaagatcgaaggacctgagaaggaagaagagaaggaagagaagcctgccaagccagccggtcctactcctgcatacatcaaccccaacgaatattcgtccgccatcctcccccacaccatcccccagaccttcgacagctccacccccgtcgaattcccccatcttcttggtttcctgaacaccccgatccgagtctacggcttccttacacaacgttaccttgccgaggacatcggccgcgaagttgccgcacttgtccttgcgaataacgcacggccataccacgaaggcacttccaacatagagtccgatcccacaagccccagtgttgaccccactccttctcccgacagctccttcaccgacctccccgctcgcaactatgagcagcagaccgttatggaggctgctgaaagcgaatggcacaagtctgtgcacaagcgcgaagaagacgagaaggagcgcgagtggctcgatgatatcgtgcttgatcagcgcattgcctcgcgtatgcagcgtgcaatcctttctccggaagatgaagcgcgttctcaacgcatcgccgagaaacaggaatacattcttggcgaggagcggccggctcccgtgcctttctggaagcgcatgtggatcaattacggctacggtgagagtgatgaggtcttgagacgtaagcccatcttgggtaacatcgacggggaagacggacagtgaagtgatcttcggacatattctgtctgatcttcactatttgaaattttgttatatactacaacggttacgggatggattcttccctggcactcagcacggcatgtgttggtctttttgttagcatattgtgactccctcctcggcttgtatattaaaggcgttttatgtcccattttagaaatgtacattgatggaaatactttttttgaattttggagtagattgttctacggttagcccgtgattggcaatagatactggtacattggattctcccagcacctgtatactcaccacttggcatcggtcaataccagagtatatttgctcatcccgtgtctttctctatgtttttaaccttcttttgttgtcccaaccttgcaactgcaagcttatatcgctaggcagccacgcaactcatgatcgaagcgggaatggggtgggagtttacacggtcctccattcgcatcgaatcagtttagctcaaagaccgatgactccggccacttcttgcccgccttctcggcgtaagcagtcttatcactgccccacttgttcagaatatccaaagcagcggtggcctcatcgatagtgatatcggaggaatcgagggtagcaagcaggtcctgctcgcactgcggcttacattcagggttgaggaattgacggccagacaggccggcctgcacgtgtgcgacactgcccttgttagtcgagaggtaagactcattccactcttcgagattctgggtcttgggaagcagcttgtcaaattcggcattgacaacctcagcgatcttctcgggaagaggctcggcgaggctatcgagagacttgcggaagcgaagcaattgaaggtggagagtggggttggaggaatcgatagaatgggcagcaacaaggcacttgacggcaaggaggtgcttgtctgtaatcgtgttagccttaaggtcccgtcttaagattccagcaaattaactcactctgtctggagtaaacctcaaacccgaggcactgggcttcgatgttctgagggctggaacgaagcaagggcgccaagaacttcatggcatccttcaggggatcctgagtctggaccagggtgttgcccagaggatcagaatcttccttcttagtctctccgtcggcacccttagcattagcggcagctgccttccttgctgcacgcttgtcggactcgaccttttccaaacgctgctgttccttcttggccttcttgagggccttcttcctctggttctcatcggtagaatcgagtccattaattccgctgggcatcggtccgtgcacgagatccggctggtcatggagaagcaggtgggccttgacggcaccgatagccattctcgtatagaagggatgctcgcgcaggcgatcttcccagcgcaccatgtccacgtaggccctgatcattcccttgcggagagagaacccgtggaagtcgaattgatcctcctgccaggtatcaaagatgttgttaaccgagtggaagcgcttcagggcaaggccaagcttcttctgtcggaggaacgcctcggcgtcctccgtcaagaaccaggtgcactgcatctcgtggagatcacccaatgttccaccgacagtctcgttgcgagtgaacttgctcatgagttccagagccttctcattatcgttgttccggagcacgtatttggccgctttggtgttgatatggcgatccttttcatcaagaagtcgagccttctccatctcttctgctgccttccctgggtttccgtaatgcttccagatccgcgccttggtcatctgatattccacagcctttggtgacaactcaatagccttctcaacattctccatggccttggggaggttgcggctgaggtgatagctgtagtgttgagccaggaagtagtatgtgcatgacaggaactcgttgttgtccccgttcgactccgctgagccgtttgttgcctttccagagagatatccctccaccaattcttgtaccacgtcacgcttggtcgggttgacataaagctgcttgatgtttacgaataatgaaggaacacccttcttcagcatgcgctgcaaataggcgtcagcggtctgcttgaattcatctccttccaggaaatcgagaggaatgcgacgagcagcatcacagcgggggtttttctccacccactcatcgtatagagccttcaatgccttgtggtcgctttcaggaatagcctttgccttgatcaagccattgtagtaaatcgagttgtctgggttgcgctccaggagagctgtatatgcggcctccgcctcggccttgcggtccagtcgcagaagataatcggccttcatctccatgactgcgagcacatcagtgcatcggtatccaacagcctcgaggtgctctagagctctttccacgtttccggtctccgcaataatcgtgttcttgtacaaggtggcctccgagttctccatatcggcgacatgtggtgtggcacccttcaatgtgtcctcgtaggtagtcagaaccttctcggcctctgccagatccccggccaagtgatgggcgatcgcgagcgcggtccagttctggcggaagcccggacgagtttgcagcatcgcgctgcggctccgaatgtatccctggtagtctcgcatctgcatctggagcagtgccaaatcacgctggataggttgcgattcaggctcgaggcggagggcaaatcggtatgctttgatggcctcctcgtagttcttctcctggcgcaatagcaacccatagacgtgccaggtgatatgcgacttcatatcattctggagagccgtcttggcgagcgcaaaggcttcctccaattgccctatctggctcatattcagagccttcatagcttgcgtgtcaccatgtttggggtttttgcgaagaacctggtctgctgtcttgatgcctgtgaagtaaaatgtggttagacaggcgaaggtagtttaaggacacttcagaggccaaccttttttatactgtttcatctcaaagtggtgaaccacttgacgaaacaaggaatggtccttggagctcaatgtttccggcattgtgggcgatgctgacgtcgagggacctgacttgtgcgagtgaggaatcgatgtgtgcgggggacgacttctccgagtccgatcttggcagagctaatgggccgataagagataactgcaccaacttcttcaggaccaaccttggaagtaatgaagcaggtggattaaatccctgttttagatcaggctgagatgcataaaatcatcgacaaatacatacttgtggtatagtgcgcaaagtctatatctcgtgatgcacacgtggtttgttgtgtacatgctgcaactcttgagtgactcttgagtgactcttgggtgacttgaagaggacagcaaaaaaggtcatgcacacattctttatacgttgaaccagaaatgattgctcagttgctcttgaaatcttgaaaccgaccatactctatggctcgagccacttctcttaggtagtacttccggactatatcacaccattctccccctttccatacaagagcagaaacccaatgtatcctattacaagtgaagtgagggttactaacagatatcatgccaggaatgtgcaaatatgtactatttggggtggggtctccccgagtctaaagagttgagttatatagcgatgctagtgtacagtggcaagttatttctgatgcgaatggcgccagctatcgagtgcttgttcccaggtagaagagacagggcatttttctgacaccatcccccatgttcgggcccgaacgatctcttcaatagtgcgctcattgcgaattaagttggccaatgactcagtccgtgcttcacgtggaaagaagcgagcagagtacgggtccagacgctcatctacttctcgttcccgatctcgagcggattctgtttgtcgaagaatcaaatcgggatcatcgggatccgggctcgtagccacaccagcgcagtaagtgagaacgtctgatctcgtttgccatgatgggaataacacattatccttgaaggtctggcaggcggcggacttgatccgagagctagattcggtctgtcgcaccgctgttgatgacggatcgaatccttcctgggctggtgtaatcaacgcgttcaagttctgtgtaatcgagtcatcgatggttgatcttgaaattcggagaaaatctgaacggaaaatagggaagtcaatataagctggtatcaagttggcacatctcaaacgaacctctgagtagtctctcgtcgaaacagaaccgaggcgtcagcgccggagcagctgttgatgaggcctgtgacatcctcctacgaatttcctccccagcttcacgattcggtttgatccagaaccactccagtttgttgaggaagcgagtattgttattctgttatttgatggaggtaggtcgtctgatggcgtatagcgtggcgttgacaactgtgacgggataagtatattccactgagacccagtatagtatgctatgaccacaagtaacgaacagactcttccagggttgtcggtgatatttgaacagccaagcaagttctccgtcgaccatcgtcgtcatgccgtaatcagccttaagctccggtccgttttgggactagctcgttccgttatatgcacgtgacagcgcgtactcgtgtccaggggcgtcgcgtccctgcttatcccaaatgttcgttcgcagaaaaagcacttgtaaatgcccttgaattgcatcttattatcgttgatacttgaaataccatatcaacatgcctgagctagcagagatccaccgcattgtgcatttcattcgtgagcacttggttgggaaaaccctgtccaaagtacaagcacaacatgatgatattatatttggcaaagtcggcaccagtggtgccgaattccaaaaggcaatgcaaggcaaaaagatagtgggagcaggtcaacaagggaaatatttctggatgacaatgtcttcaccaccacacgctgtgatgcactttgggatggctggttggttgaagatcaaggatgccgacacatactactatcgatccgacaagcctgcagatcaggagtggccccctaaatattggaagtttctgctggagacaaatgatgagtcgaaaacagaggcagcatttgtggatgcccgcagactgggtcgcattaggctggtggattgccccgctgatgagatccgagatcatactccgctcaaggagaatgggcctgatccagtcaccgataaagacaccgtggatgaagcatggctgacagagaagctgggaaagaagaaagtacccatcaaggctcttctgctcgaccaggcgaatatcagtggaataggaaactggatggggtaggtcttccagtcgatcaaagccgtcggatttacggaagctgattatttccagagatgagatcctctatcatgccaagatacacccagaacaatacagcaacactttgaatgctgatcagatcaaggatctacactctgccattcattatgtctgctccacatctattggtgtcttggcagactcagagaagtttcctgagcactggcttttcaagcatcgctggggcaaggggaagaagaaccagcccgccgtcctacccaatggggataagatcactttccttaccgttggaggtcgaacaagtgccgttgttccagctgtccagaagaagactggtcctgttgccaaagatattgacggagacgttacaaaatccacaccagctaattcgaaacggaaacgtgtggccctgaaggaagagagcgactccgaagagggagaagcgacacagactccgaagcgaggagccccaaaacaaaagaatcccattgtaaagagtgagtactttgaagaggagaaggcgaagcccgccgttgttggcagaagacggtctacccgtacatctaagtgaggtgtatatgaaactcaaaagtactagccaccacatctgaatgtaaaatgatgtacgtttaatcgcgagttctcaccagtctcctggaatgacgtaaacttgaatcaagtacaaggccacagcatatcgcagactactcgcccctacataggatttatacagtatctatccttagtaacttacaacgtatgaatatagacagctggttactataaagacaatataaaggaagcaacatctgaataaagctatataagtcaaaaagcagtcattggcctttacccttatactcgcgttagccctatgttggcacttgtttcactagcaggtcgaccctatccgaaagagatcttaagatatcctcaatctcatcctccacgcgatactaataccccaaccccttataggccttttaagttacgtccattctagaaccggccgaaaggacataagacatatttctaccaatttctatagaaatatttaggtctttagagccgtagccaataaaagcaggggtctagggatgatagaagcttgattatgatggcgaatcgcctgtaacgattattagaagaccaaggatatcgcgaacataattaatagcgtgctcaagtaacaagtcttcttcctcgtcgttagtaaagggatcaaaatcgtcatataaaggactacttctttgagtagatcatcatctagattaggttcggagaagatgtctatgtcagcatctgactctgtatcctattagactattactctccatcatccaggtctgagtctaaatctgagtctaagctactatcaggttgagtttgctagtcgtctctagacgaagtaatctcgcgcagttaaagggcagccatccactcatcccaaaaaatgctccgatcatgcttatttcactggcatcgggccagtcacctagcagagtgaagaaacccgtagcacaaccttgacttaccccatataggatgaccttttgatagctgcccgtgtctaagatacgaacctcttcgctttaagtcacgaataaattcagcactctcacagaatccttcgacttgtaagtctgttctatctccggggtccttaagtgagtagttgtcaaaccactggttgataggcatctttttgaacctcgttgcccgtctcttacttgcagtcggaaagacgacttcattatggggagtcgatcttgcaggttcgcagcagcaagaattacatgaccgaacgttcagcattgatgcctctctcatgcagcggaaataatagtgtgcgtatattcttcacccagcggtgggatgactagagggacagggtatgcatttgacattttagtggaaagggggagcgagagagtggagttaaagggaaggacaatttttgatagttatctctgaatgaatgccaaggaccagatttaagaactctttgttaatttgttagtttggtgttatggatagccatgtcatgcagggtcgtcgaataggaaagacacagacaataagcttatagaccaacctatctatcactcacttcaatcccacagacaatgggctttatagttctatttctcgctcataaagagtatttgtctgtcattgtatgcgagtgaataggatcaaccaagggacagatatataatggtagaaggccccggccgttaatatatcggtcaagtcccattcgatcctaagcaacaatcccactcccggaaaagggaaagactcgaatattgttgagcaggactactaattcttcaggcatggctgactcatgggacgtctatgtggcattctgtcaacgtagaggtagtgatcctttgcattggatgcttctgcttgctaaccccgggtcgctgcattgtacttggtaccatgttgtcggaggtcccacgaaggatcgggactacgagcgcaagatccaggccgggaagcgaatggacagttttggtatctctaggaagcaatacatcggctctattgctgcaagcgagatcaacaaggtcaagtcagcagtagtagcagtccctgtgcaagactgtcagcgctggattgtagaagtgcttgccgtgcttgagcgcaagcgcctggtcccctctggcactagtgttcattattataatcagatggagctttctcgtcttgggaaattggaagatggctgggtcttgctctctggatcctctgatgatagcgactagatgcacgaaacagatatatgaaatctcgaaggtatgttgcatattctctttgcccttgctaactattctttcttttttatagacatgtcagtctatttcctattttttatttgtattgtgtttgtgtctctctttcccatctctacgcatttgtgcctttattctcactcttgatcaagattttgtttggattctatagctctacgtttgttggcaatgcaatttcactgtcgggtcagtctcaagtaattcatataaatgtagacataaattctcatcaaccagcgccgtcacatgttttggatagcgcgggtgggcgaggacaagtaagtggggcccctgtctacgctcgggcatagtaacagtgtcctggtgaattcatgcaaaggtgctggctcacggtcccgattggtacgattgtttaggaaagcatcagcgagaatgaggggggagaagaatggattattgttgtcgtaaaggtgaaggaagaatggtggttaggttaaagctacgtgaaagtaatggccgactgaaatacaagaacgccttgaacatgtcgacctgacgtatcacagcaatgaaccagaagacgcccgtgtattgtcgaaggaactacatgtacgaaagccagcattgcacatatagctatgtatttacactctagggatattgattcaaagcaaagttccttgtatagattgcgcctgcctgaaaagtcccaagacgtctcccaagtaggagaagccaacaaagagaaatgaaattgtacattgcaagattcatgctatgtgcaaaccatccaatgtctctgagaaaacttggagattgttcacagcaggtgagtccataatcacaaaataaatcatctcaaaccaccccttgaactcgggattcatgaggacctcgtaccaacagtcggctacctcctgagcgggatggagaaaggccccacaaccaatggcaccaaggatcaagcggcggtgattgttgtgtgctgccgtgcgtagaatcaattgcattttggctatcatgagatatttctgtgccttgtccttgtacgtgagtctgtcggcttctttcactactccaggcttgctccgcgctgccatgctgataacgctaacagtggggttctggtgtagcttgtcgtccactgacatcaagttgtacccgctgtcaacgctgtttcggaaaacgatcacattgggtgaatagaggcattccaaatcgcccatcgggtagaaccggttatggagagtatcgatgagagtgcttcggtagcaaagttgttcctcttgggcctgagcacctccgagccagcccccaccgggcgtataagcattggcaaagttgagaacacacactggcatgttatcgttcttgctgccagcatctctcatctggagggcccagtcatatgtgtctccttccacgaccctaaccacagtggacaagtttggaaactccacggagttagagttcagggcaggagcggtccatttgctcgcgatataaccaaatcgagtcccctgaaattctgttctggccaagatctccaccgtggctttcattgttgtttcgataacatgtcccattgtacccgcaatgcgtcgtttcttagccataccagggtccgttggctcatcatcaagaccagttgtttgtgtggagccggacatgaatgtctcatagatggtactcatcacgtcggtgatgccgctactgctgtgattagttacagttttggcaggtgattggttcgcagtatgcgaacctattgaattcccggactttgctgacccggattcactgggctggccagacaatttccttttttgcatggcgttttctgtattgaaggtgatatatatgcgaaagaaacagtagagaagttgctaatttcatgaagacgagggttctgagggctctttatggcccatgttcactcaccaattggctagatgtaagccagtatattccttacatggtacctattgaaagaataagagaacacaaagacttgagactcgacagtgggaagtagaagttgaaagaaacatccgatgggtcacgtgcatacttcaaatccgaccaatcagggcaggtgcatcccgcataaggcggtgagcttatctccgatctcgccaccatgacaaagcgagcaaccccgttggcttgtcgccatctcgcagaactattttaatttaaaggttgcgatgtctttattctgattattccctgcaataaaattacaaaatttaggccgtttctttctctttattcagggccgcccgaagcagcactccgccacaatgagcgcgatcctgtcagcagacgatctaaatgatttcatttcgcccggggtcgcgtgtatcaaaccagttgaaaccctcccgcccaaagatacaaagaatcaagaagtatgtccgctcattgatcccttgggaccgtgtgatattagagtttcttttactgacttcctaattataggatgcttatgaagtaacgacagaagacaaagtccagcctgaggatctaccccccgcacagatttctttgacagactgcctcgcttgctctggctgcgttacatccgccgaggcagtgttgatatcgctccagtctcacgccgaggttctcaacacgcttgatgcgcatccggagattcccttgacgcatgagccgcatggcgtgggagtcaataataccgaagactctaaagagggcaagatcttcgtggccagtgtcagcccacaagtcagggcaagtctggcaacaacttatggaatttcggagaaagaagcgggatatatgatcgaccagttacttagtggcccgcagggtttgcgaggtgggggtaagcacggcaatggatttacatgggttgtcgacaccaatgctatgcgagaggctgtactggtactcactgcagatgaggtttcggattcgctcaactcgggggagtcgtcagcaatgagccagtcagatgactctcttcccaaacgacctatcttatcctcagcttgtcccggatggatctgttacgctgagaagactcacccgtttatccttcctcacctttctcgactcaagtccccgcaggctctgtcggggaccttcctcaagaccgttttgagcaagtctctcggtgtccatccttctcggatttggcatttggcagtcatgccctgctttgacaagaagctagaagctagtcgagaagaactcacggatatgtcatggcgacagggagattcctcgggctctgagtcacagcctgttcgcgacgtagactgtgttatcactgctcgtgagcttctgtctctggcttcgtctcgagggtcctcgctgcgagacctgcctttgcaacctctgcattcgtctttcaacccgcccttccctgaaaaaacactcgattcttttctttccttgaagcgctctcgcgcggaacaatccctagctacgggtacttctggaggctacctacaccatgttctcatgactttccaagctcgcaatccaggcagcgaacttgtggtcaaccgcggacgcaatgttgatgtcgtcgagtacgtgctcatgtctccagaaggccaacccattctgaaggcagctcgctattacggtttccgaaatatccaaaaccttgttcggaaactcaagcccgcgcgtgtatcgaggcttcccggtgcaaaaccagccgtcaggcccgccgcaggccgccgccagcctatgtctcgtaacgccgtgtccacaggcagctcaggatcagattacgcctacgtggaggtcatggcctgccctggtggatgcacgaatggcggtggccagatccgagtcgaggacgccagagaaacccttggtccttcccaaggagaatcactggacgcatctatgaagccatcaccacatgagcagcgcgcgtggctagctcgtgtcgatgaggcttatttctccatggattctgagtctgagtctgaactggagacccagtctcagctgttgtcactggctgacaaggaggctaaaatccacgaacgcttgcggtcctggtcagaatacatgaacatacctctctctaagctcgtctatactacctatcgcaaggtagaaagtgatgttggcaaggatcaaacgcctgctaatgatacgagtcgggttgtggagcttgcggggaagattggtggtggttggtaacttttgtctgcttcatttcgctactggaagatccacccttgctgtggacttcttcgtgggctctttgtttgatttgcatggcgccgggatctgatatttcttgcatgtctggggggatataccattttttcatttttcaagtcacggtcgatgatgcatgaggtgctgaattgttctaaggttatgacacgatagatacatacataaaggtgtaaatagattcagatatgatcaatgacattaatgaagctatcaaaacatttatccaagccctcttcaataattttcgcaccaagaggaccttctataacttccaactttttggtcagatcgggctggatgtgatgactaatctgtcaaatgcatgactaagcacctaaaatcccgcgctctagaaagaaaaagaatccagtatctcagcctcgagcctagttccacctcacaactctcgatctcccatcggacacggtcaagcgttgcgcaaaataaccacgttatcactgtactactctcaaccccaacaatgtctcgcgaaacctaccaggtcccctcgatgggcacccagaacaacttcgaccaagccggtggtttcggcaatgccatggccatcgacagtccctcagtcacttacctgtgcggcgagtgctctgcccgtgttcccctgaagcgcggcgaccagatccgctgcaaggactgcggtcaccgtgtgctgtacaaggagcggaccaagcggtaagattttcttcctgggagattagcatgcatatgcgcgaggcatggctgacattgtttcttgcttctcaatagtatggtccagttccaggctcggtagacgtctcatacacaaaaataaatcagatgttggaggttgcgatggctcaggtgtaatcggcctgagatcctgtggttttgaagtctttccattttgacgaattatgcatacaatggcgctttgggttgaattgcacaaacaagttgtttctatgatctcggtttacatgaacaagcacatgtaatcctggccatgtcctctagccctagtcccaagtctagactgtgagggcaggcttcagctctttctttttaggtacaattacatttgttttcagaattaaatactttttcatggacccgagatgcccgaaatatccacatatctaaacgtacatcagtgcactcatatcagaacagacataaccaatccgaaagcttcgtggacccgaaaagattatgacgtactaaatccaaccaacccctacagaactagtaacaagatcctactttagagctggttagttacttcaatgaattgctccaagtttttcagagactgcccgctctcgattgcccatcgtgcgcggcgcacgccttctttccagcggccgccaccagggccacgctcggtgatgacctgaccatcatcgccaggccccatgttgctagcatcggcctcgcaaacaccggaggtgacaaggagaccagccacattcatgagaacaaactccaagatggggtcatcccgtggaagctcattccgaagtatgctcatcagctttgccgcgttttgcttgggcagcttacctccaccgacctcactaagggggtgactagagaggccaaagtccgatggctggagctggaaggtgtcgaccttgacgagagtacggggattgttgatatcatcttcacttgactcatctgcctcgtctgctggggcctggtattcagggttcgggtactcagagagcctccagcagtttgtctttccagcacagctgatttcgtccatgtcctccgcgccacacacaatcatggctttcttcgcgccactctgtctgaaagcctcagcgaatactggaccaagactctggtatgccacaccgactacccgtgcttccagtgcccagtcaacagggttggccaaagggcccatcaggttgaaaatcgttcggaggccaagagccctgcggacagggttggaatgcatcatgcccgggtggaaattcggagcgaacaagaaggaataattggttttctcgtaaacctgggacaggttctctgcggtgacggctgcgatcttgggtgccaagggctggatggcattgaggacgtcggcggcgccagaggtcgaagtttgcgcgcggttgccatgtttagctgtcatcagaatgggagatgcaacgatcgaggaagtcgtggaaatgttaaaggtcgaatgggagtctcctccagttccaacaatatcacactatacatcgcggcctgtcaatataactccgacaaaatggagcgggtttgcatatcgcataccaatccaccctcgtaatttcctgctttcagattacgagttttgataattttcgcaagcgggcctctctcaacttggcaagcagcatctcgcatgcattgagaacatttcgcaatcacatctgcttccctatccttgccggttgagtggagcaacgtgaggagggcagcagtctgaatatgagatagccgatcctcaaagattagcgcaaaggcagaagcaatctcctcagcagtcacagcagggagatcttgggcgctgactcgaatgccagcagccgcggggtaggcgagtcgctggaggagcggggcgattgaaatagactcgggtcgctgagagggagaagatatagatgatgtcgccatgcttaaaatatttgtaagcgactatatgttcgtaaatagcccagcaatcccaacggggtttcacaagcttaaaagatacctgcaacatccaccagaacaatgactcaatgaaagacgtatatagacggcagaatatttcaccgcctcccatgcgctttacccttttaggaccctaaaaatatcatttgcatttcccgggggcttgccttgacctgtcttgacctgtgtatgtcacctttttgaattatttggggcattgataaatccaacagctaaattcacaatgccacctcggttaagaatctcgtcgcttcaccaaattcctcgatgccaatatgaactccgaattaccaggagcgcatccaccgctgcggcagtcacgccagctgcttcaattgagcagatgacacgctcaccagctcccgtatcaagattccctcctacccagccaccttcgcaccgcaatcccgaataccgccggtcgcaactcctacggtcatacacctcccttctccgcacatctcctctgatcgtgctgttccaacacaacaacctcaagtccatggaatgggccgccatccgacgagaactaaccattgctctgcgaaaagtggacgagaagattgccgccgaaggccggacagcgcctgccctcgctccttacattaagatccagaccatccagaccagcatcttcgaggtggctctgcgcatcgtcgagtacttccgccccagcgaggcttctctgggctcaggaaagccccccagtgcaattgaccccgtgacacaaacctccgccgagatccctgcgatttccggctcgaaggatgacccggccttgacgcacgacttgtctcgcactgcccaccaggcagtgaagaacatgaagggcatgcacgagctttctcctctgctcattggccctgttgctgttctttccatccctaccgtctcgcctgaacacatgaaggccgcgctgtcaatcctcgcccctaaggaatccggcttcaagggccctacccgtaaggcaaacccggaatatcatgagcctatcgttcaggacggtctccgcaagattaacttgcttgcagcccgtgtggataaccaggtgtttgatatcgatcagaccaagtgggtcggcagcatcgagggtggcatggacggtcttcgctctcagcttgttaccgccttgcagagcatgagctccagcgttgcaaccaccctggaaggagctggcaagagcatttactttaccttggagagccgccggagtgttttggaagaagaggagaagggaccggagggcgacaagagcgaatcgtcctaatctggtcatggtcattttgattcattttcctgtataatagatcatattctgcgtttcgtcctcaagacaccctcttcctacttcaggatcaatgtatacttgcaagaaaactactttggtgcatagtattttctgtttagcccataaatcattgcattgcctgtataatgttatgcaaaatacagactgcgcttaaaagacaagttcccttcccggtgtatgtcgacaattgttcaccatctactcctgtctcaaacgcagtttggcattcatgcccacaatgcagcgcacaagatcccaatctccatgcaaaccaacccagtcggtaacaagaatacccgtcgagcagtccgcatcatggtctttgcctcggcgacagatataatccacgatagccgggttgaccttagcagcaaccttctcgggccaagtatccgtcttccagaagttactggcactcaagaaattgacgtagaaggggaaagccttggtcgcatgcatatcaggctggacaccaaacggatagcgacaacagctagcccgatcaatctgctcggagacgaacttgatcttcttctcaatattcatcgtctccatcacctcgtagaagtcctgaatgcagagctggccactgggacacttggcattgggggtattatccgcccacgcagcagcatcaataccccaaccattgccaccatgctcgcccttcagcttctcctgcaagttaaagcgacgcataagaataaccttgccacgcgcctcgcccagagtcgggatcttgggccgcacccaccaccgactccccgccttagcgtagtggtcgtgcaggatacgcgagagctgctcgtcagtcgcgttaccggttccctcccgcttaacagagacgatcagcgtctcggacgggttgcggtcgaggaactcgtcgacttcacgcatcaggtcgcggaagtacttgtttcccgtcagcgagatggggaacgcgctgtggacgaggaccagctcgtcgcgcgccgcgtcctcggggtattgcggctgcacgcggatatcgaagaagcgaacgccgttctcgagctgctctttcgggctcacggcctggcagcgcaccgagggaggcgcgatgtggcatgtgggcgagttgtgcgtgcctgggattgacagtgcggagacgagggtgtcgtcgcggagctcgcgcatccaggcgttcaggtttgccgaggagaagattgcgaggaaggattctggggtcacgaagacgccggtgaagcggtgtttggggttctcgcttagcgctttcattcccgctgactctgctgttgggacggggacttggatctggtatctctggccttcggcctcgaagattagacgcatgcgctccttgtcggagtggatgaaggagcgtagctcggtcttcttcgttgcgaatggctcgacgtgaatgtcaacatccttttcctcaaagggacggctgtcctgttcgatggaggaaacctcgtcgttgcgggtttggttggtcaagacttgggtaaagttcctggccattgtgctgaaggcagtgaacccatctttctccggtgcctggaagcgctcaatgcgcttcaaggcgattggagtagaggtgttgttgcggatagtgaggtgctcggcaaccatggtgaatgggcaattggaattgaactcagcgtaagtccgtgtgcgaagggtttgtctcagtatggatcggaaccggctgcctggagagctgagattgaagtggattacccctccactggggatcagcggacgatctccgatcggggagcccttgttcttggcacgcaatgctgattcgcgtagatatctcgattgcagcacagagcggagattttcaagatctgtatggagtgcggcgtccgatatacgatgtaggcaattagtgtcgcgcctagcttggccctggcgatctgggcctaacacccccgggcttactccgtactgcatattgtacggatttgtttcatcgtttgccaggattgaagccattatgtcctttttttttttatagaggaaagttcaatgttttcgatctccgaattattctaagattgaggtcatcggattgacaaccttggtccgatttatgcctaccatgggtgtacatctgtacctttttatcaaaatatttgaagacatagcatacatgtacctacatatgtaggtacatatcgtatttatcgatacagaatgtgttacactccagtggcaccggggggagaaaacggctgcgactaagtcacacataaggagcccctgttttgtctgctagatagcttgtcaaggcagtggagtgagtccagcgggattcatcaccgtcttcgtgatgatatctcggaggaaagggatattgaattcgatgagcccttcttggtcggttcttatatcagtttctgtaggaggtactggattccgtaggaagaggtgaaatgggaatgagtggagctccagtgactctgtattcatcccctgagtcactttccctgatctcgtttggtgaagacatttagtaggtcggttccaatgcatttatccaccaaagccaagacaaagaatgggaaataagactgactgaaacatccgctttggtgtgtgatcgtaactccacaatatcttcataagccgagaattgtttagcaatctgaagaatagataaacaaatgaaactataacatattcattggacaatgggggtaccctgacttgactattctactcctactgactctcatttgttgattggtctgttagagaccttttcgatccaaaaggagactatctagtagggaacctgctggtggaagtagtccgtcataaactccacctgttttggcttcgcaatgggcacatctttgaactggttaccgagttccatgaccacctgggtaccattggcactgttggggctccaacgcggcaacgattcgctaccattgtaggagccgccattgttggggttgagggtcttcgcaaagttggcccagtaggacgacatcttctcctggatctcaaagtcggtcttggtaaaggcgtacctatcagaattggcatagagagcgccaagggcatacatgatctcagattggtggaaagctccttggttctgacttgggggcgcatgggtccaatagtacgtatagaagtccgcagtggcagacttgtaccaatcagtggcataggcccatgatccgacaagagagagatcacgggcagcagcgttccaggcttgagaggcaatggtatcgttgtcgtggtcgggatagagcttgaagtattcgctggagaggtttccgtacttgagtccacaatagtactcgtactcttcaacggtatagtcggtgttgggagaggcaccagattcgtccttggtgttaccagtaatcacggggacatcgttggcagggccattgatcagggtttcaatgtacttggatggaagcacatagccgtccagaacgggcttgaagatcagaggataaccggcagagagtgcggtaacccaccaaatggagctgttggtgacgcggtctgaggaaccaaccagtaagctctccatggagagcgcgcgcatttcctcaattgtagaaacattgtgggtcttcatgtagctagcgccattggagatagcagtagacatgttgacgtacgaggtggcgaggccagccagcatggtatcgtaggggtatctgatcccggactgggagataccaccgtgaaagtagccggcgaagagggggctattgactgcatggtagacttgggaagagccgaaagactgaccagcgagagtaacgcggccaggatcaccaccaaatttggcaatattcttctgcacccacttgagaacttccagttgatccagaacaccatagttacctgaggtcttgcggccagtgagcttgtagccttcttcattgagctcaggggtagcgagatagccgaatgcatcatcgcgccggttgaatgtgacgagaatgacatccttcaaggccatgccaccaccgtaccaccactcattgttgctggtttcgtcagacccttgattccaaaccatgacagggagtttggcatcagcggtctgagcgttggtccagatgttgagactgaggcagtcctcgctaatgtctgaagctgaagcactaggacaggcagggccaaagtctgttgccttcatgaccttgttccatgactcgcggggctgcggtggcttccatcggttctgatatcctgtatcggcagcgaagggaatccctaagaaagcggcgacgttggactcggtgccatcgaagtacttatccaggatagattggttaaagtactggaacccctggacggggccgtaggaagtttggatgaccttgtcccaaagctgggcttgggaaacagcagccaccagagccagtgaggccagagtcttgggcaggagggccataatggcttttgtaccgctaaaaaaaaggttgaagcggttgaaatcttgaagtacgagaccaggactcaatggaccgacgatgtatttatacttggtaagcttggcacagttataatttgaaaccggttaaatgtttgtgcagcaagatgtactccgtgcctcgtcatctggtgtcccggtgtctagtatagtagtggatttcgggcttcaaagggtcggcctcggcttccgcattgagttaaggtgacgaggatcatgttgatgtcgtctccactcctgacacgcggacataattcggggagattccgaggtgttttctcgtgtttctcgcagaagtaaagcacattattgcggttgagctgtgcaaataagctcggttttgagtactggatagggaagagttcaatctgatgaggttgaagtgatcgaaaacttgaagcacaagtgtgatgaaaagttaaacagaggagtccagtgatttcatatccgttttggtgacgaagtctcggagaaaagggatatcgaactcgaggcgctgccttcgagctcggtgcaactgcgccgttgagaagccccggaggtcttgtttcgttaggtaaatcggccgttcgaacgccccgtgaactggaaaattccagttactcgtgatcatgcatgcaccacctgtagtattccgccctcaggctgcagtgagggtcgacatgcatttctttagggaagtgtgagtaaatgaagggagaaatcttggaaggacttggataaatgcttccaaggctatctcctaccagaatggcataagcataagcggctaactacccccatatgtattcttccaaggttgtatgctacctaaaggtataagggctaaggcatggtccccaaaagccattgtagcatccacatcattacacctatcgacaccaagaatcaaagcatcggaaggacccttgcatgatggagatgctatttttaacttagaaagagagagagaaagagaaagagaaaagaaaaaaaaaaagaatccgtaccccaactacccctggtatgaggatcgaaaccctgaccagtttcaccattgactgagcttcccaacgcggtatcacccgggctcgttgttctacccagcaatcagatgaccttgtgtctctcacccactcagccacccagggaggattttgactgactaccttgggttaggcataagtagactgaatccctttgtttgtatgcatcttactccaattgtctctactagtataactgccctttgagctcattagttagtctgcttcatattatactgccctggtgttgtatgtagcctatgtgatatttatttgcttaacacgtcccaattgatacttcacaattgactctttataacatttccaacagcaataattgtctagtgatctgaaaaataaacaaagaaacgagaacataacgtcagtgccatacttcccccatacttgcataaatgcggggagatcacgtgggtagcatcggttagcgtcggcgtgcgggcagaacagtcgatgctcgagtgccaaataaaatagacacaatgctccttttctcttcaggaatttcaaacaacatctcttgaatctgtccctacaaccatattcctctataatgactttcagccgcagcggcggtctcgctgcccgcaacttcaggccttgtctaccccagaatcgcctccgcattcgctccaccctaactccgctcttgtcccggagattccatgccagctctctactatgggggattaagtcccaagttctaaaggatgttggtgaaggtaatctatacctaatccctacctcattgctcaatttatttacttacaattactaggcatcaccgaagtccagatcattcaatggtacgtggaagaaggggctcatattgaggaatggaagcccttgtgccaataccagtcagataaagctgtcgatgatgtgtgtgctacctccttagttcccatatcatgggctaatggctaacgaacccagattacttcgagatacgagggcgttatcaagaaactacatttcgagacagatgatacagtgcctacaggaagggtgcgtactaccttcactcgcgcgcacacactgaagttaccatactaacaggcttcggtaggcactctgcgacatcgaagttgcggatggaaaatatcccgatgataacccaccgcacgaatcaagggcagagtcgtctgaacctactccagcccccgaggtcccagctccaactcaagcagccgagtcctctccaataacccctcctcctaccaatgttaccaatgttccggaggagacacccaagacaaagcatgcatcccttgcagttcccgcagtacgcgggctattgaagagccacggcgtgaacatcctcgaagtcaacggaaccggcaaagacgggcgggtgatgaaagaagatgtgctgaacttcgtagcccagagagactctccagcggcttcagcttcggtgcccgcgccagtctccgggtcaccagacacacggcaatcagagtcaattgtcaacctgaccccgatccaatcacagatgttcaagacaatgaccaaatccctgaacaccccacacttcctctacgccgatgaactcaaagtcaacgacatcaccgccatccgcaagaaactcgccagcgacaaacgcgatcctaccaaaatcaccttcctccccttcgtcgtcaaggccgtctcacaggctctgaccgagttcccaattctcaactcgaaagttgatgtcaccgaccccgcaaagcccaagctggtcatgcgtgccaagcacaatatcggaattgctatggatacgccgaatggtctgattgttccgaacatcaaggacgtcgccagccgctcgatcttcgacattgccgcggagattgcgcggctgagtgcccttggtaatgctggcaagttgacgcccgctgatctcagtggtggcactatcaccgtgtcgaatatcggcaatatcggaggtacatatgtggctccggtgattgtgccaacggaggtggctattctcggcgtcggtaagtctagaactgtgccggtctttgatgaggatggacaggttacacgcggggatatggttaacttcagttggagtgcggaccaccgtgtcattgatggtgcgacaatggcgaggatgggtaccagggttaaggacctggttgagtcgcccgagctcatgcttctaaatctcaggtaaattagacaagtcacagttgataaaagtacttagttatatctatataataacatctgagtacatccaagacactgcatggtttatctagtttgcgagctccaatatattgtatatattgggcttcttagtacatcatgtagagaaaacgaaagatgaaaaaaaaaaaaaaaatatgaacaggtcaattgatatgaagaatctcatcaggacaaaggatatcgcgaggcctgccaagccagacagtttgatatatcaaaacagaagctcgatacatcgagaacgccagatctaaaacagaccggtgacatagtcaagccggccaaaacaccaaacaccattgggaggaacaagaaaaccgaaggaacagaaaagaaacaaaatgctaaacaatcctccatgcatagatcatatccattttcgcgagaacccacatggcaatgagagatgaccgacaaccccatcaagtacacaaagtgaactcactcccatcaatccacagaaagacagagagggaaaagaaaatcacttatactcagcaagcttgtcagtaacagcatcaacaacattgcgctgcacctcctccactgtgccctcaacattgatagtaatagcatcccactcttccttaggctcctcaagcaccgcaagctgcgagtgcaccatgttgttcttcatgtagtgtgatttgcgctgtgtgacacgctgcatcagcacctcctcgctgagcttgaggtagatgaagtggatgtgcaccgatggcgagccgtatgcagcgacgcgcatcacatcccggtacttctgcttcagcgcggagcaggctactaccacgccggtgggtgggtggaaattgttggtttttgagggggagaggacgtcgattgctgctcggcgcaaagagatgagccagtcccagcggtcttcgtctgtgagtggtgtgccgttgcccattttgtctttgtttgccgcggggtggtactggggttttggttagttatgtgtatacaatttgggggtggtgctttgggagttgttttgggtgtgtgtgatgtagtatgtctgtgttccaggtacttggtacttacgtcgtcgccttctaggaatgggatggctagctcggtgcgtaggacgttgccgacggtgctctttccgcaccctgctggcccggtcacgatccagatatgttgcatttcagcgggtttgggtgtggaggatgtcactccgttggttccgttggttccgttggtgaggtcgggcatgatgcgcgccttactcacagtggaatctactatgggagtgtggggaggctgtggtcgttcccctgcggagagcatgttgtaggaaagaaaagaattggttctttttttggggagagatatggagagtttatctctctttttggatttccgttataatttgggtcggggtggagatatgacgctgcggtgatacacgggaaaaagtgttctataacaggtctataagattcaggaaataaaagtccaggaaataagaaataagaaaccttggagcatactttctctaagtacttatattgtaggtgggtcgggtaagaaaagattcaagcagaagccgagtgggggacaacattcgtacggttattggttctcgatgttatgtacatgtaggctaaattggatatcttttggactatatccggggagattgtgaataggcaaatattcaaagaagatagaattatatgtataactatctgttctgcttataagatgtatactttgttctattaactcttaattgaactaccatgaattgataaaatacatccataaaatacatcttgacgcaaaagtatcctgatgatgtcatgggtattcggtattaccgtaactcacccccacgctagaaagacaccgccagttgggatatctggatctgtctcctattctcccctattctccccaatgttgtgggattttgtgggattttgaattgatcccactaatacctgcgtcatttcaaggttctttatctctcccgtgccgaacaacagcccgagtaagtcgacaccgagagacggccccccacactctgggagattcgagatccacccgatttttgatcgtacggagtacacggattgccgatactcaatcccgtgaaacacagaaacacaggggagacaaatgttccgggaaaaatatagtctcatccgataggacatatgaaaaggacacgaaaacatgagggaatatgcacgatgattccctacagtcacaccgactatacccaggtgtgcctggtaagcataagcatgagaaccccggccattgctttcccctcaaatccggggaagaaaggtacttccagcggggtaaaccagtcggatcattgcttggactagacctcgttttccgtgggttttgtcaatggtcatgagggaagctgactgtgacgggaagcggattccgacatttccgatctcgtgtttatccggtgtgcttcagtgggtgtgctggggtctgatccgtatggttaatttgtatttggacgtttgaaggacagcgcagacgggcttcaggcccaatcggtgggaaacgttgaggaatctggaatctgccagtggatctgacatgactgaagagcccaaaggccaacgggtacttaggtactccgtagctgtagatcagtagtattggcttcgatgagagctctggaactaataccggagaagatcaagtggaaccaagtatgaagagagtatcaaatatcttatgtggatatctatcaagacaagatctcatacaatcaccagttctatacaacatgtcaaatatcagggcggggcgcggagcggtattacataagctatctccaggccaccgcgacagctccagatcatcaaaggtccgacttattggttcgggcctcgatagctgcagcctcaattacctccactatggcttcactcttcttctccacccccgtcgacatcgacgtggtcctcgaagacctcgatgagcgccagaccgttgacgtcaagctcgacaagggccgccgcgagcgggtccctctgtacatggatggcgagtccgtcaagggtgctgtgaccatcagaccgaaggatggcaagcgactggaacatacggggattaaggtgcaatttattggcacgattggtgcgtgggaactgtcatccagccttccccggctgaatttgccatcgctaacaccattttcggaatacagagatgttctacgaccgaggcaaccattatgaattcctttccctggtccaggagctcgccgcgcccggcgagctgctccacccgcagaccttcccattcaatttcaagaacgtcgaaaagcaatacgagtcttacaatggcatcaacgtcaagctgcgctactttgtccgggtgaccgtctcacggcgcatggcggatgtcattcgggaaaaggacttgtgggtgtactcgtaccgtatgccacctgagaataacagccctatcaagatggatgtcggtatcgaagactgcctgcatatcgaattcgaatactccaaatccaagtatcatctcaaggatgtgatcgttggccgcatttatttcttgctcgtgcgactcaagatcaagcatatggaattgtctatcattcgacgggagacaacggggtccccgccaaatcaatataacgagagtgagactttggtgcgcttcgaggtatgtggtttattgaacacacttgatatgatatcgggttataaagtgcagactataaggatgctaacttacatgcagattatggacggttcgccatcgagaggttagtgaacacctgaagactttcaacgccgccagggccaccaacccgcacccttaatgatggtcacgagggttggccgctttgggtaatctttggcataactgacttgcaataggtgaaaccattccaatccgtctattccttggtggatttgacttgacgccgacattccgcgacgtcaacaagaagtactcgacaaggtactatcttagtctggtactgattgacgaaggtatgcttttaattaatcaattctccattctttcccggcctttcccgtccttggcaatcctcaatgcatccatgacacgtcccaaaatgcggggtgcagagacaggcaaaatgcatgcaatagccgtcggcaaatgaagttacccaatacagccgtccaaatcggcccgggttgcatcatttcgttgccggtttccatctgaaccccctaaaacccgacacccccacgctaaacctcttctggcactgcaacttcattgatacaatttaccatacactcttccccatcgctgagacatcattggcctacaatctcaatgttaatctcaaactaacccaacaacagatgcccgccgttacttcaaacagtccgaaattgcgctctaccgccaagcccccgagatcgccccgaacgcccagatcgcacaacagcagcagatccagcagcagatgctcctcgagcaacaacgccagcagcccgctcttccaccgggctctgctaccgctggaccgggcagagaagccaccgcgccgcctcggcaggagcctcagcccgttcccgcgcctgcagcatagactatcttattctatcctcgttatcgttcgcgtcgttctacagctcttggtacctgcggatctgttcttctatacccgcctcttgtctctgatgtcgatttcccctactcctctactactcactattccttttgtgtccattgatcccctctcacggctatgtcacgatatcactctgtagtatacttactctgcctacattcgtgccaagctctgttccaaatcgaacctcattttagattcagattgtagcatgcctccctttctgatgtattggtccagagaatcctggatctagtgtataaagtaaaacaatgcattgatcgccatagtacatagtacacacacagccgggtattaattcacacgcgaacaaaccctaatactcaaacctaccaatttcctgcaacaccttccccagcgcctggagaatctgcccatcatcacgctccttaccagcgacctgcacagcacgtacagccaacggataaatccactcaagatgcttccgataatggtgctcctccgcatccccagcctcggcaaccgagaccgtcttcagcgaaggcggatccgggatagccgacggctcactcttcagctccaccatgcggagcagcagatggagcagggccttgcgggcaggcgtgggctggggcattaggccgcgcagcggctggtctgcgatatacgacttgagcgagaccgcgcagcgcaggaggaggtatggcgaaatcgagcgggcgagcagagtctgcggggacggggcgtcggcttctgtctcggccttagcttgcgagtgtgccgcgagctcgaagagcgtgtctaggaggacgtaggctattcctgggcgcagggttggcggtgggtcgaaggtgcggccggggcgtacagtgtagaagtcttgtaagggtgcgttttcgaggccgctggttggtaggtcgaagcggaggggggcgtagatgaaggaggagtggaagagagcgcgggcgaagtcgcggcggacggcgtctgggattgctgctgctccgagggatggaagaatgagagtcttcaggcggttgaaggctttgatgtcgaatgcttcgtctgcggtgattcgagcgttggggagttgttgagtttggaagccgcgtgcggaaacaattccatttgtgatgtcgacgatgcgttgccagaactcggatgtttcggactcgtttgcctttgtgtattgtccttccacgtagggaaccgcgatttggagaacgttcagagatactgttgtggcattttgccataggaacggctcgcggtccttcccttgccatgtgtacttttgcacaatcagagcaccgaggtgttcgagggtttttgcaagagcaccattcgtgaagacgtcttgcttgatgccgaattcggcaatgtaccaactaacaaggtcgatggtgcatttcgagaaggccacgaacgctggtcttctagtgtcgcccccggggctccattttgatagcgctgagtcggatagttcggcaagacacaaaagaatatccggctgggactcctctttctctaggcagagcgtcttgatacaatcaatgactaacgcttgcagggccgagggtcggtcaacatctggagagtagcgcggggagactgaattccacacaagcaagctgagatgatgaaggacgttttcaatgtgtttcgtggtcagctggtctttgtaaagacgatagacctgttggaatgtacgtaaataggccaaagcagcatcttgattaggttggtccaagtcaagcatcttctcatcgccggcagggtgtccgttcgcccaaagaagccacgcacactcaagagcatcgttgctaagctcacctccattctgcacccggaggaggattgctgagaggctagaaaatgttgcttcgctgaagtccaaaatatgcaagttaatcaaactttgtaagtacttcaaaagccgcttccatgattgatcaaacttctcgtcgtgcacaagggtctcgaagaaattcgtcatcaaatttgataaacccttgatcatcaccactgttgtatccacccacgccttgaaatcatcggattttgcactgctccgattgttcttggcttgaagcagaggggtctcaataccctcggccatcttaaagaggaccatgtttaggcacagacgccacgcttcaggggagagctgctgcccgtaggcgtcgaagatacgcagaagcgtatggactgcgctatttcgaatctccggccgactgtctgtcgtgatgtcgacaattcggagcaacagcagcagccacaacgagttccgagaaatggaagggtcttcttcatgagccagtgtagctagcttttcttcgctgacggatacatcaacatggccaattgagatctgttcgatctggccctgcaggaagtccgaaacgttccagaaaaacgaggtggtggtgagggagatattgaaatcttgagtttgagacgcaaagctagagaaggcattcaccaagctcaagagacagggcgctggtaacagcgaaaggaagtcggatgcgacaagatgcaaagacttatacgcagcgcgtaccagacgagggcctgctggaagagccgatgatctgcgctctatcggagtggaagactggtccccagtcccaagatctggagcaagttggaaaacaccagatattagatcgaagatgaggtgccatccgtccacgaaagtttctgcatactgttccagaatgttgtttaacacttccaaagtctgttcatggatttcaatcacggtgatcggtaaagacttggaagtgtgcatgtcagatgcatagagcgaggcaacctgggctttcagtgtctgcaggttcctcgtctgcacttgattgtagactttctcgtcgtcttcgtccctttgtttcattgtcgaaaacacaagggaattcaaaattgtgcttgcctgcaggcgaagatttggactgacggtagtatttgcggaagccgatatgagactttgcgtcagtaggtcccataccgtgctgtcgtcttcctcgagcgaagacagcctcctaagatttgctttggctagttcgtttcctttctctagtacgaatttgagttcctcatcttgcatccttgattttccgacagtatgcgatacgcgccgtgaaccttggtgcaagcgtccacttttttgggaggattgcggcgttcgaggaagttctgatgcttcctgggcatcaccctggttacggtgctgctccgtaaatgttgacagattcaataaggcaaataatatttcctcaaaggatgaacttgggaagtcgctggtgctttcgagcattttgtttgaagccgcttgaaccgcaatcacctcagtcccaaggttggcagttggaacatcgtttcctggcgtgaccggagtctccccagtcccactagccgatttgaccattgcacttgaagacatgccaatcaccagtccagtatattgaagtgtttcgaagataatggaccaggccggctgatccaatgtcggccccaaagcaattccgaggttgagcaaagcccgcatacaaagtaggttccttgtgcttaaagacacgggaggcccttcccccgcagttgttcctgtgagctcggttgataaagaagtgggatttgacagatccgcacttctccgtttcttttggagtgtgtcaccttgctgggagccagtggcagacacattgtttgacttggcaccacccgcactcgcaggtgtggcagcctttccaagagttgttaagaaagcatctcggggaacagtcaatctcaaaagacctgccacatgagctaacttctggaatgctcgaacgaggttgtggtaatactcgtcatctaaggatgcacgcaagaaggtggaacaagctgctaggacagcgggccaacagttctctattatccccgcacaagtcttgatggcggagtactgtacatgagactgcaagtccagaggattgacgggtacatgtgattttttcgatgacgaggtagactgccctcgggtgggttctgctgtgaagtcttgagaagttctggcggagtcgggtccctgaacagggctcataagccgattcttgcgtctttgttttaggtccggtaccgtcaatggaagaatgaacttagcgagcccttcagcaaagctgctgatacagttaagaacgaggctgtaaatgtaagtgtccggcggtgtgggcggatctgttttgtcgaggagatcgatatatggcgtacgaacaacactccactgagtgctaattccaggcaccttggtttcacttggaggcacagttgacccaatgacaccagcaacaccccctgtttcaagagttatttgatcctctgtggtggatctcgagtgctccgcgcgtgaaggtactgttgattgattgctgaccccaatcaacgaaggcttctctgaagctagccgaactagtgcagccatgtggtcgcggaggatattctttctgccttcctcgccatcatacaaagtgtagatcaaccgcacagcacccggctccgagtatagccctcggaaaacttccatgcagagcaatcgcttccaaggcgctgtcccatctggttcaacgagatgggttatcagactcaatgccatctcacattctgtagtcaagagagacatatgacgcttcaaaagaatgaggaggattcgagcgactcggacagtttgagcgaatgaatatctctcagatagacaacggacggctagtggtaacagccgaacgcgcagcacttgcgaaagctcgggatgtcccacaaaaagacggccgctgtttaggagaatactctcgataagctcgagcacaaaagtcggggatagggttcgtgttcgcagaaattgcagtggctcaccatcgatcagacgacatagatcatccaatacttgcagtgcatcataggcaaagtagccgatatcgagagactggccatcaactttgatagttgtggtgattttggtatccttaggaaggctgtcttcgctcgaaactctttcaaatgtcgatacaaccagttgttggagagtagccgcggcagtactagaaactgcaatcgttttgcttgcctgtaatgtggcgcatatttccaacgtattcgcaagaagctccccactcaattcattggagtaaaactgcaaaagtgaaggcagagattgtaggattttcagctggatatcaaggcctagaaagtgttagcgcaatttaaagatgttgatacgtttagccacttacttaagctcgttgtctccttcaggcccccgaggacatctttcaaacgactcgagggcagtgaccgggatgcaattagtctttgcagacaaatcacaccaataccggcaagcttcgcatgccgagtatggcatgcaatgatgaatggctcgacaaagttcggtttgcgaacaaggtctaatgacgatttagcggttggggactgacagagggtggccatatagaatttacctgcggctatctgagcctccgaagttgatggcagtgctttgagctcattcaacgattgttcagcggcctgtcagaacctcattagtataccatgacagatgaagtctagagagtgataaccaacatttcgcaaatcggagtttttccttcgagactcatgaaccaaattggcaagctccgtctgcaagaattgggaggacatttttggtataggtccgttgtatcaaagcatggccagcactggctaaccttggaatgcccgaggtcccgatgtcaacagtacaaggagctttcgatcgcagatgaatagatcggtgtttcaacaccagtctagttgcaaaaatggagcttatatgccaggttcatgtgagcagcaagagaataatgactgcgattctgttattacaatgatcccacgatgggatcaacaaggcgtggcatctccaacaggtgccaagccatcgataagccgtatcgcacgtgactttgctccaacttgaccgcccagcgcattgcccctctcagtcgcaacatccctctttgacttctgctcacacttgtcgtgatatttccagcctctgaaaccactactcggccttcaacatggctgctaaggttccgaggaattttaggctcctggaggagctcgagaagggcgagaagggtctgagtgcaggtacgatttgactaccacaatctccgacgatgtccggtcttagatcactgacgtatctctcttattcttagatgcctgctcatacggacttgctgatggagaggatatgatgatgagcaactggaatggaaccatccttggaccgcctcacgtcagtttccggctctactccacgccaccgacaaactatcgctaatctgccatctttcagagcgttcatgagaaccggatatacagtgtgaacattcactgcggacctgactaccccgataatcctcctaccattcaattcgtctctcgagttaacattccctgtgttgatcccagctctggcaaggtatcgggagaatcggtaccaaaagacgagaccttcgctaagtgattgtacacaggttgacccgacaaagcttccaacccttgcgcagtggaaacgagactataccatggagacagttctgattgagttgagaaggtgagcacgaagaaagacacagggccggttattgttggtgttgacactttccaggtacatggccttgccccagcataagaagctgccacagcccccggagggctcgactttctagtccagcatgtgtgacccactcagtgcaggcggatctcggagtatcagggccggcttcatttgaagttcctgacttcttctctttttctatgaccctagagcgtgtacagtttctgcatgaaagcatcggcaggggctcttttgggccccaactctcaatttccatccctacattaggtattcatctctaaagtgttctattttgtggaactgggcattgcggcaggcgcctgtttaccaataaacaaaaacaaatggtttttcttaccgagtggcaacgtatggagagaatgacttagcccatgattgtattgccatgtgcaaattttagctgtctagcatgacgcaaccagagggttgtaggtaggaccttaggtcaaaggtagggacggcaacaaccttggggggaggtcaaaagatgtcaaaccacaaagggcatcaacacgatccaggagagttaagaggccataaaagcccaagggctgcagaagactgcgggacacacctaagagtaggaaaaagccaaacaaatgtcaacatgtgaagacacagtgggtaagagatctacatctacatgaaagcttcttctccaagcgcccggacaagccgaacagttgatgaaaaaggagttcgcgtcgatcgggggtagtgtaagcccaatgacaccgtgcaacaaggcatgcgcaagcacaggggccaagtcgcggggtccaaaaataggaataatcaaagtgtttcctggacggaaactttcagagattaaactgaaaagaacagatactacacttgatctaagccaataggcaaagagagctgaagaagaaagaaaagaagaggaagttcgggggccgggggcgagtatatatagacaaattgtggtcacgtgttctttgccaaaggcggtacccactggcattttctactagcctgattgggccacctgccgtagacatgtaattgtacgctagttcatttacagtaggcggtaggtgggcggtgtaaggagataagatagttaactatggttttggcttcggcttcattattggtataactattcaacacagcagaatgcacaaagtgctggtgcccaagtatagtggagctcatcgttttgcatgtgagagatgaatttgtacttttcagtccttccagctgacaatatgtctttgataggcttggcactttatcgagcacttctccgacaatgtcgtccttcaaccacagacactccgtggctgggtgagaccagacccctcattcggcacaatttccgaaaatataagaaattacaaagcccatcacaaacagcgaatgccttgaaggcaggctacgaggtatgcccatcgaatcttcatctgggctgagcttatattgatatttcctcgctatgtgacaggctctagatctcctctcttcgtcccgtaccaatcagcatgatgcacaccgaattacaactctcatagccgaagccagatcacagaaagttaaatatgccgcgatgcaaagggaagttcggccagtagcgccggctgccaaatccccgacgcccaaggaagccaaaaaagcaaagtcaattcgcttccaggaggaaacaaatcagcgacatcccaacgccacctccgtcctaaaccgacctcggccgttaggcggcaaaaaacgcaatgtccctgtgcttgtcaatgcacgcggacttccattcttgcgctataaaaagcctcagccgagaaacgttagcagtgtgatacgaaaaaaacttggtcgtcgttggaactggattgaacgacgagataggctgaaactagaactacttttcgccaaggatgaagaggagtgggatcgcatcaccgagactaaggagccatccacttggtctgagcatcctgcgaatgccattgccgatgtcaatgcgaaaatcggacgcttcgatatgcgtacgaaagagcttacagatagcatgtggaaaattgtcctagctgaaaaggctttggcggaagaagaagctagtcaaaagcaaccaaagcaatgagaccgagggatctgccttgccgcgcacgtctcttcgctctcccaaagtacatcccccaagctcctacggcagatggatgtgggccataggatatggctggccatattacagccacttatgtctatggccatgccactgtcaatgtcgcccgatatcataatacaaaggtcggttgctcgaagcgtccaaaagtcatggtgcattatccatgtcaatccggcccggtatgtccttcattgatcatatctgatcaatgggcaccatggactgctatcattgtcggagtcgccggactccaacatcaagcagctaaagccaagacaatagctctctttcaagtcctcttttgtccactggttgggcattatctttccctgtacatagcacaagtccatatggacttgcagatctgtatattactttgtttacccctaataccagttcgctgactgatcagtatgtataattacaccaattcaatgaggttataatacataatttcatgaagtaatggtaggtcattaacatttctatgtatcagctcaagcagccattttgagcttctcaacagctggcaaggcatcatcatcttcctcgtcataatcgcccttggccaagcccctctcccacaattgccggcctgtgagttttttctcctctttcgtggtctttttcttcttgtcctccgattccttttcttcacgtgcccgtagctcctcttcctcctgctcctttttaaacttggcactccactctaagaatgactggacagtgactgctgtgccttggaatttccggttctcctcctcctctctcttcgcagcggcttcctcgatttctgcttgaatggcgtttgctcgctcggtcataagaagctctgcgctttccttaagcgcactgaccagtgtaaatatcatcggcatacccagattctcttcgatggtaagctgaagagattccatcaataggtcccggtcttcctggacatctagccgaggatgcttcacagcattgggtggagaggaaatgccgagatttgggccaacatcggggtagtcttccggataggaaacttccaggcatatcacaggttgttctctttcatcgccgtcatattcgagggcgtcgagggttatggatactcggtaagaggtttcggatatgtctaggtgcatctcgtgtgagcaaggataaaaagagagtatgagctggctagagtattgcttaccggtgatttcatcggggaaaattgaatcgagcacttcacgctcctcaatctggtcttcgcggcccatagctgttgatccgcccgcggattggaggggtaatgatttgagcgccgagatgcagattctttggggaacacctcgtgggggtacgagagcggttctagctgggtgaactgaaagattgtctaagcaagactcttgagatgtcgcaatattaaccaacttgaaaaaaaggattggagcgcaaagcaaatcaacgctacagacgtcggggccaaggcgggtcacgtgaatataacaattctccgtcgtcgccggctctcagtcctggaacctcaagatgtactttatataaagctattcccatttctggcactaatgattactgcccttcagctataacgccgagaaagaaaagtctctataaacggtatatataaaaatagcgtctaaaagaaaggacggcgtgatgaattgtcaattccctgccggatgatgtagctattgcaattccaaggttcatttatatgtaaccaatatatagcaatatttgcccctacatgtttaatctcttatatgtatatgtagctctgttctacgagcaagtcatgccttatcaccttaaggcggtaaagaagcatcaatcgtacagaccagcggcaatactgcggtcccacatgcaaacccgtcaaacagctccaaaattttggaggttcacttttttctatttctctcagataccctgcgggttacaattgtgaatacattgtgcttggtattcgaatcgacatcctgatctttttattgacgcttgctgcatcctgccatgggaaagcccagaccgcaaaagaagaagtcatccaaaacccgcgaaaagtccgtccttggccctggtggttccatctcgaaaggcaacatggctcaaaatccctcgacgttactcgaccaagccacaatcctcctacaaactggtcgagccgatgaggcactcgcggttgcacagcaggctctagatttgaccgctgacaacaccactgcgcagctccccgccattaacctgcttggagaaatcaatgttgagctaggcgacatcgacaccgctagaaactgcttccttcaggctgttcaactcgatcaaaatggctcgataccggaatcccagggcggaggcgctgagaaattcctatggcttgcacaattgagtgagcagggcggaaaggacagcgtcctgtggttcgagatgggcgtggcatccctcagacagactattcagtctctcgagggcaaaacttcaccagaagagatcgccgagattacacagaagaagatcaagttatctaacgcactctgcgccgtcgctgaaacctacatgaccgatctttcgtgagtttctctatattctaaattttatgtgggtcaacgctaacatattcgctcagttgggaagaagatgccgaagctcggtgtgaagctcttattacggaagccctcctcgtcacacccgaagcgccagaggtactacagactctcgcctccattcggatctcacaactgcgcaccgaggatgcgcaagccgcgctcactcgcagtatgagcttctggaaggacctggccccagaagatctcagaattcccgactttgcggtgcgcatcagtcttgctcgacttctgatggaagtgactatggagttcgaggctctggaagtcctcgagcgcttgattctagaggatgatcaaagtgtagaggcctggtatctcggaggctggtgtctcttcctgctggcagaaaagcaacaggcacctaaggatgcgaccaccgatgagcttgccgagtccccgcgacatgtatcactggatgctagtcgtgaatggctcaaacaaagcttgaagctctacgatgtccttcagtatgaggatgagcggcttcgcgatcatgccttggagcttgtacaggaaatgaacaaagaaattggagaggatgatgagagtgaagctgaaggggagggagagggagaaggcgaggattcggatgtggagatcgaagccgactctgacgatgagatggcggattcatagataccaaaagtgacgaccacatgatatgatgtacatgttcattgatacaatgtttgtttgatttgataccactagaagtagtttctttctttttttttccaactgtccctttcattgccaacacacctgaaccacaaacccaaacttctttgatatcgccactgcaattcattcatcggttccggattaagttgtctccggtgaggcagatgcccgaatttttgtcagagcagatttcaagcgcgagtgaaaacgagtttgtctccgtggctggcatctcaaactcctgcaaaatggatttggtaccagccccaaaaggagaggcttcgctaaagaccaccgtggtcgaagtggaggccgtggatatggaggaacagtatgacatggaggacgacgcgccggacctcgcacttgaaatcccgtcagatttggagacagacagtgatgactctgaaggatgggataatctgtctcactgcgacgaggcgatcaagttcctacgcgatgaccagatccgcgacggcctcggtatgtaactatatccaccctcacctcttaccccggacatccccgctcccgctgatcagatcgaacattggctgatgcgctcgcttttctatacagttcccggtgcctgtaccctagaagaggcaactgcatatcggcagcgtctgcatgaaattggtaaggcggcgttcgttgaagaaaccatcctccgcgaaaccgtcacggccaaaaagctatgcacggcgttcggaatcgcgcccccggcattcctcgagggtgcgccagatgaatcttatcattctcttctggcggtcgcgatctcgcgcgagttcgctcggaggcccaagcttcctcagtacaacaccatcgacgatgctgttcggcttcttcgcgagtctcggaacatcattgttctaacaggtgcaggtgtatgttcatattgaagtgtatttggaacctctctgaaccatagatgctaacagatattttatcagatctcgacaagtctgggcattcccgatttccgttctaaagataccgggctctattcaaaactggcgcatctaggcctgagcgatccacaagaagtcttcgatatccatgtcttcagggaggacccgaacattttcttctctattgccaaggatattctcccgacggaaaagaaatggtcgcccactcatgcattcatccggcttcttcaagataaggggaagctgttgaccaactacacgcagaatatcgataatatcgaagcaaatgctggtgtactcccggagaagattgtacagtgtcatggatcctttgcgacggccacctgcgtgaagtgcggtttcaatgtccctggcgatgcgatcttcgatgaaatcagggcgggcgacatcccccactgcaccgcctgcaaggagagaatcgcagaagaagaattgaagccgcaaggtctcaagcgcaaacggagttcaaatggtcaacagaaagaccgcaaggtctccgacgaaagttcggatgaggacgactatgaaatcccgactcctggagtgatgaaggtcagtgcccattcggttccttgcttgctttatctcctgcttacaaacagtatagcctgatatcacattctttggtgaggatctgcccgatgagtttggccaacgtctcgtccaccaagatcgggaactagcagacctggtcattgtgatcgggacctcgttgaaggtagcccccgtggctgaagtgccggggatcctacctcgcaacgtcccgcagatctacatatcacgcactgtaagtcatgctgactacattgacactgtatcatactgaccataccgtgtagccggtgtcacataccgagttcgatattgatctcttgggtgactgtgatgtggtggtatcagaactttctcgccgggtcggttgggatctacaacatgatatgataccagccgatgagaaggtggatgtttcctcggtggagggatatgaatcacgacatgttttcaaggtagtcggtgcataggggcggagttttgggcatgtcttgcttctgtcttcagggcgtatctttgggtttcttttcatagctggatgtgtcttcttaggtagtcttggtcttgttatttcttgtgcgatcatatcacatctgggtagattatgggttttcgactgtagttcaataaattgttcaaattgtgaatcttcttgatgctgcacaattatcttgtccagttagttctacaaccctgcatagttaaatcattaaatagtattaatcatatccctatgatgtttttttgctcaatgtagtatttattagacaataaatttgattcttgttggaaatatataagatatacaaatccatactttgactggccatactctccgtggagtatatttctgaagacccgagaaaaaaaaaaatctcaacccgcaacaccccgccttgaagcagcgacgaattacatgaactcccactgaagagaaatcccgaagaaaaaaaccaggaagatatttgtctcgctagccatggattatctggttcggttcgcccagctccatgagaccttccgacggccggaactccaagcctgtgccacgctcgcgggcgttgacatcgaaatcatcacctacaatcaatttgtatgataccctttctatcaataccggaggcatccaaatgaccccataaacattgatcctgatgataatgctctacctatccttgcgcgatcattctcaatttgcagaaacttgactgacgtacccagtcaccatactgtgtcgtaagactaccagacgaagctgcggcacgggcagttgccaagcgcagtatcctggtcaaagatatcttcgagctatggggcgaaggcaccaattatgaagaggtacatgcagatgtccgtcgacgaacccagcatcgctggaacgacttcattgctgtcccattcaaattcacgattgactacttcgcaggaacgcgcagcccagctcagaagggagaaatcattcgatcgttctcatatatggggttcaaaggcccgatccggctaacaaaccccgatgaggagtttttcgtgatggaagagtacatcgacgacgtcgaagtatctacactgggcgtgtcgcgaatctcagacccgcggaagatttacctcagtcgcaagattgccgatagctgtcgcgagagtgtgctcaaatacgacctcaagaagcgtcgttatattagtacgacttccatggatgccgagttgagtctcattacggcgaacatggctctggcagcacctgggaaattgttctttgatccatttgtcggaactggaagcttcatagtggctgcttcgcatttcggggctttgactttgggtgcagacattgatggccgcagtttccgcggcaaagagaccgggaaactgggtatatacgagaatttcgaccaatatgggctcaagagcaaattcgttgacacgttcacttccgatcttaccaatacgccactgcggagaactgccgtccttgatggcattgtctgcgatccgccatacggtgtgcgtgaagggcttcgggtcctgggaaatcgtagggggaaacctgcggttaacgtgatcattgatggcgtccctgcgtatctgtatgtctctttgcttccattgccacctacagtactgactttgacctatagccgacctggtttcgttcctcccaaaaagccttatggcttcgaggctctgcagaacgacgttctcaacttcgcagttcgctcgttggttcccaatggccgtttgtcgatgtggatgcccacaacaaatgacgagaaaaccgagttccctgttcccatgcatcagaacctcgaaatcgtcagtatctctgttcagcatttcaacacctgtaagtgacagcccttgcgatacaataatgatattaaaaaggattgactgatcttgtgtctgataggggctcgccgacttataacgtaccgtcgtctaccagagggagaattgtcagacactacgctggcccggaaaaagattgacgaccagggtactactgcggatgatctaaatgcattccgacgagtggtacgtattattagggactggatggctcagtagctggctaacttctcgaatcagcatatgctcaaaggccacggcaccagggtcgagaaggaccaaaaaacgaaagaataagaactccgacatagcaaatccgatgggaagctatctagcctaccttcagctcggagggttgcaaaattgcgttatagaaaacctatatacagcgaacagcctgaagatgggaccaatgaccagatgcaagaacagaggagaacaccagacacagcgtactttacaatttccctcgctggcttccgtctgaaaccaagtctgcagccaagtccaccccctcgtccctctgaattcgtttgatttcctcagccaactcaatcctcaactcacgagccaagacctcagcctcatcatcatcgagctcctctctctgtccacggccaaacatagcaaagcttgttctctgattggccccttgagcagggcgcgggatgatgtggaaatgaacgtggggtactacctgcgctgctctttcccctgtcacttagttagatgattgctgttttccttcttccatagacaagagataaaaggatggctcatagactttagtgcggttttggcttggtgacaaatgaaataagatatgtatcggtcaggggtgttcaacctccttgaataccgatattgatacataacatacacaacagtatacaacgtacaaatgcatatgtacacggtattcaaatccgctaaagaccaagggtttccgaaaatggagaaaagcaagggcaagacataccattgttctgcacaacattccaatgtctatcgggatcatcgccaaacacagtcttcgttacaaccctagagaggataggaagccatttccccatctgggtgccaaatcaaagacaaggatcagcaaaagaagcatttctcaaataggtatagataaacagatgggaaataactacatacctcctgtcccgcttgaacacccatatctccaagcaacttgtaatgatttcttggcgctacaaggacatggccgcgggtaagcggcattatgtccaagaaggcgagaacatgctcggtggagaggatgatgtgggataatgggcctgaatcgggggcagtagaggctggattgatctcaggatcattgaagggggttgggggatatgatagggcgatactgcagaacggacatggcgggggtgcagtgggatccatgagtccatgaggtggaacaattttatttattccgagtgtgaggatgtaaacttggtttagtgtcagcgtcaaagatagatgtaactacctaggtacctccatgtatgttgtagagggtttcctctgccgggtggggctttcctatctaagctgccgccgctataagggcgcttagagtcagactcactaagtacctaggtagattttagtccggacttagggtcactaagtacctagctactctataattatgtctatcacctgatattatatgacggtgacagcatggcactggtagcgctggcaaacctcattcccggaaagctagcgtgggtggggttagttcggttgcatacacaaggcggtgtggcggggaaagacaatgcctatgggtgcctcagattatatttatggaagaccctactgttacagcggtttccctacaactacaggggttagtcctaattaggatttgcctctcttggcatcccatttttaatactagtgccatttattatggtaccaccgtagtaaaaatcacagcaccccagccaccttagccacatagtactttgatgaaattaattaattgatctgatccatgcctctattaaatcacatgatctgtacagggctaatttactagggttatcagagcactccattcctgttcctaccgtcgtcgaatcttgggaggaaggcaatcacaccctcatattgatgcgacgcatccctggagagcccctcagcaaggcttggccgaggctttccgccaatgaaaaagagagaatagcaaagcagaccgccgagtatctgcaacaacttcgtaagctccagtcgaatagtatccaatctctcggcggccgtccagttttttccaacttcctgttcaaagataaggattccgagcttccccatggccctctagcatccgatgatgatatgtgggatgatatggaacgtgggctggaagagacgatacccgaggctgcacggattcgacttcgacattgtatgccatccgctacgccttatacctttacgcacggagacctcacaaatgtcaatatgatagtcgagaacggctcccttactggcataattgattgggagatgtccggttactttccagtatggtgggaatatgtgtgtacctcggtccctgacagtgaggaggacagagagtggaaggcgttgctacggaagtatatgcctgatcatagcgccgcgcgtgaattctggctggactattattatctttgcagggatccaggcagtgaaagagcaaagaagttcatggagaaagtaaggagtgagacctatcaaagaggtgtctagcttttcttcgtgaagctcggcggggtttcttttaagcacatcgacatcttcttttctcaataatcatgttttgcccgtaaatattttgaggggactaaccttggaaggaccacgggactaacctcggttaagctcgcacaggtgagcttaattggacgcatctactacctaggtacctacagcccagatataccaaaaaagaaagaataaaaaaggaaatggtttcactaagcacgccatacacacggatccagtgttagaaatccaactattttgaacaaaacaaaagcggcccaactttgtcactgattacctcgaccgtccatccgatatcaatcttgcatgcctggaagactcagcttcagtatccaattgaatcttccagctgatgaattgacaaacacccgagaaacaaaaaaaagaccatagccgccttggctccacaaaagttttccaatccacaatgccacgcaaacccgcaagccttcggaacttgcatgacaaaaaaaaaagtgatccaaaggggataacactgcatcgtccaacctatgacaaaggtgaaccagggtgagataaggtaaaattgcgatttgaacgaagagaaaaatagatcccgactcctgcaacgcggttgacgagaatgtaaaagatatcaaggcaggcgggagacaatgctcatgcatggaaaacaagcaagccgggtttgaagatgtaggggtaagagaagaaaacaaaagcacacagggccgagcgccgaacaccccatcacagaagacaaatgcggaaagcgcagaaattcaatcaagtcgtcgtaagaatatgcaaaaggtagtgaataccagcacaatgaaatgccaacatatgtaggaattcgatttccctgctcaagtcgtcgcatgggccttagggagtcatgaaaggcatcgacgttggcgagacaggagtagcatcacatcgtaaatggtacaattactgttcatccttggcgtaacggctctgctcggagccgtcgacgtacagatggtgatacttcttggcccattggcgtgtcaagatagaagctggaagactcgttagcgtgccatattgcagaagggaattaccaatgtagcttacccttcaggaacttcttgctggcgtatttcttgaagaaggcttcgtgggagacagggcggtggagataatcaaccatcaactggaagacggggtcgatctcctcttcggtgtaaccggagtagtgagcgagagtggcatcctatgataagttagttgggatgtatggaacatgcgaaatgcaatataacatacccaaggtccgcgctcgaggatgaggcgtgcaagatacatggctgcggcagagatgtgactttgggggtagctcatgaaacggtgatcgaggagactgatctccatcaagtatttgcccagagtacgggtttggatatcgtagttatcggccttggagatacgtcgaaggaagttcatggggttggggaagctcatgttgtactcgagggttgcgaggacgtgacgttcagcatcgagaatctccttatccgagaaggtctcatcggcaacatggctaaagttggcgacgtgaggggagagcacctcctcatacttggaggcaatgaacatggcggtaacaccaacgagctgaagacgatcaagggcgacaacttcagcagataggaagcgatcgataatgttgacagcaagaaacagggtctcgggaaggagacggaaacgggtgtgcacttcgataagccaatccacgaggataccgcgcatcttccattcaaggtcgggctgatggtcgatgtaatcagggttgggcagagtcatgatctcaaggtccttgagatactcgaagatttcaacgacgtattcggcggccattaatgggtcatccaagtcctcagtgtccagatcctgcacagcgtcatttatagcatccttcacgctaacctctgcctccttcactggtggttcttccgcaatcttctcgataggtgtctttcgctcaagctcaggcttcttgcggggaggctcctccacttggaaggccgtatccttaagcgacggacgcttgtgggcgttggggacaggtttcttgttcgagtcgcggggctgaagggcaggtcgtgttgcagttcgtgaggagttggtgcggctgagcttttggacacctccggtctgaacagttgccttcgaggccaaaccagccttggcggcaaccggtttcttcccagctttcacctcagcaccttccgtcttgttgacattgctgacatcaccgagggcagcacggggacgtagggatccattacccgtggtagtcgatgtggttcgcttggtctgcatggtcttcttggctccagcggcagagacatcggtgctgagggcggctgtcttggcccgcgtcacacgcgctgacggaccgttctcatcgttctcattcatcgtgcctctggtacgaaggctgcgggcctgcaatggagtcagtgattagtctagtgaggtcataggatacgcctagatctcgatgctatgggaccagatatcccgcgaccaggatatcagacgcgtgttttggaagtgttaaagatttctcacctgaggcatcgtgaagaaagtaaaaggaaacagacgcgtaggaagagaagaaaggggacagggatataatgattctggtcctgcttgggaaatcaggtcagcattccatttgatattacctcggtggggacctcataccagagggttaaaggacgaggtgcacgtaccacgcgtggaaatgcggatgtgctgaagaaactacaatgccagtaggcagaggtagctttcagacaggtggagatgatatgagtcgatgattacgcctcaaagatgactatgttgatgtgtatgaagaccgcgcagaacccttgttccgaagatcaaatggcgcgcgaatcgggggaaaaatatgtcaaatgatacagaaatgatctggggacactgtacaacaggaatccgcacgcgataatttgttagtttgggagtggggggaaaagatggaagggtagctttaactggaatgatgagggaaaaggatgagagcttgagggcaaaaggcgatgtttggccctagtactgtgcctagcgtggaaaacaatccgccccactcagccagtcgcgtggatcaccgaattgaccttcgagcccttttttgtgtaaaatttgtagaatgaagaattaagctgagcaatgaaaaactgaatcggaacaagcaaaagacgagttgagataggttagaaaagtagatccagcaatgaagggagatacgcgtgagtatggcgatgggtaaataaactggttgctcggacaacgatggcgtttcggtttcgtatagtatcggacctcctgtaacaaaggaaccacgtgactcgaattcgatataaggcggtcaaattggatccacgtcccgtgacaagacatgcgccacatttgatgagtagtggcggtggaagaggcggtgcaggaggaaagtcacgtggtaaggtgaactttttgtttctgtagtcaggtgcatctctacaaagcagaggagaggagctgctgagtgtttgttggtctactccattgtcagttttggctttcaacgaccacacttttaaccaattgattccttcaaacctcacctttccccttcctcccccatcctttggcagcaatgctccaaccccgaattgccctacggggcattcggctgccctttaggtgtctaccatctctaccttcgccagttcgtggctattcgacaattgtgaacgaaattgagaagaacaagcccaagcctaccgaaacaccattgaactcttttattgacccgaacgagtcgtttgctcctccccccggccgagattcttctggcattcagctgcgcacctacactccgcgcacccccggtgtgagacatctgcggcgtcctgtgaatgatcatctgtggaaaggccgcccaattcacaaattaacgtttcctaagcgtggccacgccaagggtggtcgaaacaactctggccgagttactgtccgtcatcatggaggtggtgccaagcgtcgaattcggacaatcgattttctgcgcatggctccggggccacacaaagtggagcgtatcgagtacgatcccgggcgcactgcacacattgctctgactgttagtaaggagaccggcaagttgagctacattctcgcagcggatggtatgcgcgccggcgacgtggttcagagttatatgtccggaattcctgaagatttgtggaagagcatgggtagcactgttgatcccggtgtgcttgccgcgagaaccgcctggagaggaaactgtctgccgttgcacatggttccggtgggaacattgatcttcaacttggggttgcgacccggcaagggtggccaactgtgccggagtgctggaacatatgctacagttgtggccaagggtagtgattcgcgccagcaaaccgttcaagatggacagcctgaggccgaaaagaagcccatgtcgcagcgcgagcagcagaagctggaccgcctggcccagcacattacagtccgtctctcaagtggtgagactcgactcattcacaaggactgctgtgctaccgttggtattgccagcaatccgaactaccaatacgcccaacttggaaaggctggtcgctcacgctggcttaacattcgtccaacggtgcgtggtctggccatgaacgccatggaccatcctcacggtggtggacgaggcaagtccaagggtaacgttgacccgaagagtccttggggtattccggtatgtataacattttatttcgcatcttttgaactccttgggactaactcttaattttcacacccagaccaaatctggctacaagacccgcccgaagtggaagatcaacaaggctgttgttcatcccagacctcgcaaccaaggaaagcgccgtcgtggatacaactagagatgatgctgctttgccgaagtggccatttcgctctgctttgcccccgaaccatttgtacctcctcaccctatacctcatccctaatgcgcagaggatgactgtacgatatcttttccttttttttttttttttgggcacattaaatgtcttatcgtttcttctatcatgcgctatttcttggggattattgttttgcgcatctgccatctgactgaaactcgggcaatgggcactgtacagtacgatggctcgaggccatatacattcaaagcgaaaagaaaatagatttataaaccgtttcatctctttgcgcatagtagatatagataaatctcatatataatgtactcggcctttactctgcttagcgcgtcgatctgggccgatgcgtgccaagcctttaggcaatgtcgctggtgcgtggccctctgctgatcgcacctgtcaacgctcttattggggatatggaaattcaagacttctccatggtttcaattagaatccgatcgaaacgaacaaaataggggctcattaattctatatttcttcataaagacaggttgggccggaggagcgctcagcctctcctgatacgaacttccgtcgtcatccatagaacttccttttcacatccccacctcggtatatctagccaacatttggatgttcctggctcgctgacgcctcaggtctatcctattcgcgccattccaggtcctccctaaaccaaatcgcgcccggacaagccaaagttcgccaagatcaattcattcatttgaattactcagctactacatcacatctcgagatcatcagtgtgcaatcaatcccgccatggcggcacttccgccgtccaattttggacccgaatcgtcgcaatactctgcggaattcggctcatctcaaatggaattcatgtctggtgaaagtggtgccgctgccgaaagtactagcactggagaaagcaacttcgttccccgccccaagcgcatcgcatgtgttgtctgtcggaggaggaaactaagatgtgatgggagacggccgagctgtgggacatgctcacgtctgggacatgaatgttcttacgatgaagttcgcaagaagagtggtcccaaacggggatatgtcaaacagcttgaagcgcgattaggtacggactcgttgacagcaatggccgcaaggctatattggcagtgagctatatcgctaactataatgactgcatcagcccaagtagagactcttctcaaaggccaggatccggaacccacccatcgaaactccccacctcaaccattggataatgcatttgcagcacccatcaccgatgaacctatattggatttgcctgacctctcggacctaggaggtattggaggtcacatggatggctcgtttccagcttccactgcccccggcgcaggtcagccaagtcaaatgttatatcctccgcagccaactacccagggcaacagcaactctccatgggacttgatcagtctcgggctggaggagccccttccttcacaggatgtggtcgatgaactgtacgtgttatatgcggctttctacttggattggtctctaatacaatggtgccgtctagggatgctttattctttgagaaggtctatccaatgatgcccatcatccaccgtccccgttactatgcagccctgaatctcgcccctaatatgcgaccaccaatctgtctgcgatacattatgtggtgccatgccgcatccgtcagtgacaaatatttctttctgcataatcatttctaccagcgggcacgcaagtacgccgagatggacgaaatgaaaggattcggagagaacatcgtcagtttagcacattgccaagcatggatattcatcggcacatatgaattccgaatgatcttcttcccgcgagcctggctgagcgttggtaaagctggaagactagcactgatgctgggattgaatcggcttgatggtgttggtctcgacgtcaaacaatcgatcttaccaccgaaagattggacggagcgcgaagaacgcaggagagtcttctggggctcatttgccatagatagatattcgagcgttggaaccggttggcccattcttattgatgagaacgatgtcagtatctctttcgtgaaccctctagcgaagggtgataggctgacaacaaccagatcatgaccaacctccccgcatccgaagaatcctttatgaagagcaagccacagcggacacttcccctaaacgatattctcaccggagacggcgtctctacactagcccctttcgcgtgtgtggtggttttggcaagtctttttggtcgtaacctcatacacatccatcggcctcagcctcaagacaacgaccatgacctcaatggggagttttggaagcgccacagaagccatgataatattcttctgcacatttcgctatccttgcctgatcatctccgacttccaggtggtatgtcggacgtgaacgtcatttttgccaacatgagcatccatacttcaaccatctgtcttcaccaagcggcaatattcaaggccgaaaagaacaagatgccgaatcagattacgaccgagagcaagcgcagatgccttgttgccgcgaatcagatttcgagtaccatgaagatgatcagccatgttgatttgacgagcgtgagtctctattgagtttacttgcccaaatcagtttcactgacgccttgcagctaaatcctttcatgtcgttttgtctctatattgctgcccgtgtttttgtgcagtatcttaagtcccgaccagaggactcgagtgttcattcctcgttgcaatttctcgtctccgctctaaacgccatgaagaacaaaaatcctctgaccgagtcttttcttgttcaattggatgttgatcttgatggaactggcattcgcgctttggacgatagacagagaagcatatctgctgcacgttcgactgtagtaggtctccctgacttgttccctaatggctgattgaagctaatcttattttctctagcatacatactgccacgataaggtcgactgtaatcctttgtacaacctccgccaaacacaagggatggcgaaggatatctccccacaatacagtgccaaccacggtggcaatcaacaacagcctatgcctgctggcttgaggacttccctccctagccggaacagggactccacggcaccgcccaccacaggaccactctataatggcgacgacacccgtcactttttcggaacttccactcaggcgacaggtccaaaaatgagccaagccggaccaccaggtgccattatcgatatggacatggattttccgcctgatttcggcaacctcagcgacagaaacaacccaccatcagaccatcccaccccctcgaccttgaactcatcctccaacacctcctattctatcaatggtgctgacgacccaccacccggaaacaagaatcaaaagacaagctcagtatatcagagtcaggcgtcgggaccgtcctttgacaaggtcaattcaaacgtcatggcacaagggaatacaaacccgcaagccactgatttgggttctatggccgggcggttttatccaagcagctctgatagcccgtcagctgccgcaggagcatcgggaatcttttccatgccctcggcgtgggaccttccagctccaaatccggaaacgggcaatgaagactttggcagtctaaacatggagactttcagtgaatcacaatgggctcagatgttgaatactcaaatagtgggtgaaaatgggacaaacgctggctgggagaactggcggccatcgtgagcacatcgcgcggtggactatactttcctataaaatgatcttggttgaatagcccatggtgaaaacccgcaaagcttgagtttgttgcaacagatgaagccttttcatgctgccgctcaacgaacgacatcggggctttgtattctctgagcctgcgcggaatccaagatcctaggctctcactagtcaggacgacccatcgacgcctttatcaaactcgggatctcatatgagactcggggcatgccgtcatcatattggatacttctcttttgctattggtttccctccccgccccaggctcacattgatatatgcgaggcaccggcatcctaattccatagacttgggccgaggactttggactgaggacttggttaatttaccaaccacggaactgcaaattcctttgcatttctcttcttgccacagtggtcgagtaaagtggcagcctgataagcttccattaagctctgcttttgaatgatttgatgacgaacgaatgaacggtctttttggggcggaactcttcactcttggatagcttatacggttgcaatcggagtatttggggcctgttagttcatgttaataaccgatctctacaataatacattgaagtcttaaggaatctattgatcttacttagccacccttttggtcttttcaatacgtccattcatgataattttcgataataatctaaatcacagaggccatagccaaaagcaaagcttgctgaagaataggaagtacaatagaatgctcgaggttacaggccaccaccagcagcaccgacaatcttcaagcctccagcgctggagctaccaggtccatcagtggtagtcgagtaagcgagccagtagcgagatggatgccacgcaacagcagagacaccagcattgacaccagcagtaggaattgtgtaaatgctatcgccagactcagcatggaagatctccagtccattaccaccacatccaatctcatcgcatgcgccaacaatgaagcggccatcgaagctccagctcacgccacgaatagcgccaccattttcgctggacaaagtgcggcgacagatccagtcggttgtgtcccagagggagatgagagcgtcgcttccgccaaccgccaggtatcggcctgtcggggcgagcgcaattgaaagacaggccgaggtgtgggcgttgagagtgtgcataatatcgaaggaagggtaggacatgattttgaccttgccttcaccggttgtcacgaatacatgctgctccggacgttcgggtgtcggcatgcaccaggagaaggttgtcgcatttgtttggacggtctgagggtgaggatcgagagctgtgtatgtggttgcgccgggtgtagaggaggggaggttgagggcgttcacgccatcggggtgggtggtaggagaggaggggaattgaacggagacgggaatcaaggtgtcgtcctgtttacatgtcgtatgttagtggctttctcatgagagcatcaaatctgcggagtcgcagcgctgcatgattaccttcttgccgacgatcattgtgctgccgtcagcagaccaggagagtgtaaatgcttcgccaccgacatcgaggcggctcacacatgtcttggagcgcacatcccagaagcgcactgtaccatcggccgagcaactggctagctccgcatcgcggactgggttgaaaagagccttctcgataccagcggtgtggccgcgcaattcagtagagtaccgtacatgaggacggtccgggttccagattcgcagagtgcgatctgctgagccagtcgcaatcagctggcccgtggggttccaagcaagagtgcggatcctgtggtcccagaccgttgtcagtaaatgagcgatagcccctggcgcaaaaagccagacttacgtgtgagagcctggtcccttggagacagggtctaagtagttttgggttttcacgctcccaaacacgaatgcaaagtgatccttgtgtaggagctcgcgacgcggagcgggcgccatctcttcgtcttcctcctctaggaattggcgcgagattggactacctgcattcgaaccagcggtagaaacggtagcagaagaagtgataggacttggaagctcaggctggatgctattcgaagaatgatggacagacggagagtactcagataccgcctctaggaagcccgatactgccggaggatcgttatcgggtgccgccatcacgatatccgcctcaggcacccaacgttttctgccttagtagatttggggttcgtccaatttgcgtttcaatcgccaaaaaaaaaaaaaaaaaaggtacaataacaagaaaataaaagaaattaggataaaaggaagcaggaagcaacaagtgaggaaccagttgagttctgtaattttctgggtctcaccgtttggcatggcacctatagggaagaaatgcgttctacacgttatatcaacaccaccaggaactatgcatgtatgccatagacctaaagttgtttagattgcaattggcacattagttacttccaagttattctagacatcttgtttattccagggctacattgtatgttggtagactttgcattctaattcacagtatagtacgttctaatggacagcataactttttttggggctttatatatacatggtcacataataaaagctcttcaagcaaattaatatagtagaattagaaggaaactccaggtttaggttcctctcacaagttgacataaaagcactacattgagccattatacaggttacagtttcgaggctgttgatatttattcatacatattatcctgaatttacacatgccttcggactcaatacatctagtatctctacaatactcctatattggttacctagactttgtgaaaatactccaaattccaattcgacagttgaatgtggaaggtttgatagctgcagccttatgggtccgataagccgagcttaatcggacctcacccttcggctgaaaaattgacactgcagaactcaagagcttcatttgtcaacattaagcatcacttcgaagactatcagagaaagcatgtttgaagaagtggatgacgcatcgcgtcgtgaaaagtgcttcactaccatcgctcagctgccgacattcatcgacccaaagcagatcccgggcaagagattgcccttttcaacaattcaaaatcatgcattcgtacactcagtaggtggcctgtggcttgccttgagaaatacaaggtcattggactgatcattgggtataggccgaggttatcttgcccaaggagttttatttgcagttgaagccgtcgctcgagcgcaaactagaaaaacctcgatatgcacgaaccttcatgcctccttcggctctgcttgagcatgatttcttcaatacatatatcaaatcaggtatttttgcctccgccggatcagtcgaaaagctcttccatatttggatggccctcagtcggcatcagaccacttttgtgcccagagagaccactttatcgaagacggcagtctgacttggactgacctgggacatagggaatatattgatgatatccgaaggacgttcaggatccgataatgtcttcacactccaagatggttcgttcccctgaagctgtgattggaagggtcttgtcgttgcggagccgagaattgactcgaatggaaacaggggtacttcgaatggaactagggaaggagatctatgagcgaacaggtctcacaggcaagccttgtcgcagcggcggcagaaaacatgccaaagaaagattctgtgtgtgtaaccagagcatatgggctcatcgaatacttactaattatgtcgtcagtggtagaattgaacttgcggctgccctccatgcttcatggcaagaaaggcttcgaaagaatcgtatgggcattcaccaatgttctgactcaatcaatggcctggctcttccacgacctggaaagcaaccctggtcaggatgaaggtgattatggccccgaatccgaaaagggaaatagcaataacttactgaaagttgtagcaggaaccaagccgatcaataagctccaaccgcagttgattacctgcgagccacaggaaattggtcacgagcaaataatcactccgccgtttcttaacgaaaaggggaaagtactcgagaaaatgtcggaaggtgatctgcaggaacactgtggctccctgtccgaatggcttgccatggttcagatggcttctccccggttatctggggaagatgacgtcgatccgtacctgagtcgttatacagttccagacgcagatgaaagccagacctctgatttgatgagcttaaaatggcatggtttgatatcgtcccgttggatcatgcagctgttcctgaatctattgtgagttcggaatgtttcctgtggtattctggtcgagaactgacgtccaatagacaaagcaaggctagcaatgtatcctggtttgcacttgccgtcgctactctgggcaaagaggccgtggagggaagggacggattcacggttatggtccttcctagggaacctagtgaacccaaacaaacagaagaatctcaggaatctcaggatagcaaacgaaccaatggatcagatggtcggatgactctatgttgggagttgatgggggcatcggtgaccgaaccctgacctaaccctgtgccctttgtcgactcaccccatggggaattatttctccagggcttcatccacaccaaccccatcatcttgccctggagagagcaggtcacgcagcttcgcacaatcatcttcatcgttctttttcatccttccttcttccccatactcgcattttcttccccatccattatccattcatccattacccattcatagctacagaatacaattagctattccacagtcgttgctcttcgagtctcccagtcgttcagcaattgacactctttattcatatcttctatcaattttcatgtttctgcaccttccttgactctacaaatctacctgtactctcattcacattcacattctcttttcatcccatcattcattatggagcctactcagttttttaccgacgcatttatcgaggaggcttatgagaaagctccaaatgaggctaccaccgacgcccctgccgatgcgccttatgatgaacatccacagcaggctatcctgggccttgacgaatggaaagtgcctgcgaatattttccgcgctgatggttcctgcatgaccctctgggaactcgctcgtgctaatggtaagttacatctcctgatttacgattatcggactgaactgacttgtgctcctaggatatcacttcgaaggagaccccgatgagagtgccggctctacttttgacaaggcctttcttgaactcggtgtcgaccctgtcattggtccagtgactgaggatcacattgagcttgaccctgaatcatctactcccaccgtggttgatgtggttgatgacgtgaccccactgagcacttgcaccaaccagccgacagtgtatccgctggacaccctcaagtatctcgagaacgccgacctgggtcctccccttgcggtcgttcaagtcactcccaccaaaaatgccccaaccacccaaaacgcttcggtcactattgatacggccgttaaagtcgctcctgtcactgctgctccgatcacccaagttgctgcagtcacccaagtcgctacttcagtcacacaacacactccgatcgccattgatccagctgttcaactcactgctgccgctgatacctcggttactcaagccacccctccaaccagccaagccaccaatgtcgttccagtcgccaatgttgccccggtcgctcaagtcgctcctcccacttccggtacagcaactggcacggtcaaggtttttgctttgccacaaggcaaatcgcgcactcagccacccaagcagaaaggcaagcgggttcccaaggggaaacaagacgacgcgctacacaaaatacagaagaagacaaaggctcaaagcaccgcatgcaaggccaaagggaagacaacttcagtcccagtcacatctcagaagattgcggctgccccgaaggcacagacgcctgctccaatccgtttccttgccccaaagactcctgtccctgctcgggaaacttctctccctgcctcgatgactccagtgccggcgggccatcccagccagcagcagcagcttccacttgaggaacgtctccggaatcaagagcagcatcttcgtattgaatggaagcaacttcagcagcaggctgctcatctcgaacgtcagccgcgcggagatccacagcagctccagatctacgaacagcagcgtcagctcaacgaacagcagtttaagctgtgccatcaaaaggtctcgcagcacaaagagcaggtccgtcaataccggcatcagcaacagaagcagcatgcaatgcaacaacaccagcgattccaagctgcagcgactcagcaagctcagcagcccaaccaccaaatgcaagcagtttatcccacccctcccaaggagcgcatggagacttccatgcaacaagtccagcaagttcaggcgccagagcaagttcagcagcccatccatcagcagctccaaggttcaccggctcagcaattccagcagcccactcctcccaaggagcgcatgcagacttccatgcaccaaattcagcaagttcaggcgccagcggctcagcaaattcagcgacccatcaaccaacagctccaaggttcaccggctcgagtccagcagcccaccccccaagtgcaggcagcgtatcccacccctcctaagggacgcatgcaatctgtgacgcccggaaccaaccaaatccaggcgccagcggctcagcaaactcagcaacccatcaaccagcagctccaaggttcaccggctcgagtccagcagtccaccccccaaatgcaagcgttgtatcccactccccctaaggagcgcatgcggtctttcatgcatcaaacccagcagctccgaggttcaccggctcgagtccagcagcccaccccccaagtgcaggcagcgtatcccacccctcctaagggacgcatgcaatctgtgacgcccggaaccaaccaaatccaggcgccagcggctcagcaaattcagcaacccatcaaccagcagctccaaggttcaccggcccgagttcagcagcccgccccccaaatgcaagcagtccatcccacaactcctaaggagcgcatgcagtatttcatgcaccaaacacagcagctccaaagctcagcggctcagcaagttcagcagcccacccaccaaatgcaggcagtttatcccatgcctcctaaggagcgcatgcagtctatgatgcaacaaacacaacagctccaagcatcatctcagcaagttcagcaacgcacccaccaaatgcagggaatatattccacccctaccaaggagcgcaagcagtctgtttcttccctttctgccgcttcgcccagaaagagaactttcgagtttatggagaacattgtgcctagcaacttcgtggctaatccagacaatcatgcgcgatggactgttagccctaacggcgaccgaacctacttgaacggaccccaggtgaagaaggcacgagtttctaggaagtagaatcggacagagatggtgttgtccggcacggctgtgaacctttcctttctttttcttgtttcgaaggatcataatgaggtgttgagaaggaggtctttgctctttgtgatcgagttcaatatttcgatggggatttgtttatgcggaggatttcaaggttctgatcacggtgttacagtaggtacacatggattgtagcctacatgaatgcaattttctcattcatcactttctactgtagattcgattaatagagtcttcacgcatattatttacgagaagagcagctgtttctaaggtgggctctgaagagcttggaagcaatcttgaaaagcaaatgaggtctgcaaagccaatcatgatcatgaaggcaccttttctacaggtaacgaaagggaatgatccgaaaagccatatccccaaagcccatttgacagccgataaccaacaggctgcagtgttaggcaatagccagagcgtacaggatgtccaatgcattcgccaagcccaaaacataacatacgcacgacgagtggctgtatcagcgcgccaagccaggtaaataaaacagaacgcgtcgatttgcatttaaacattgaatcagagaaacaagacctcgattgaaacatggtatgttagcccgtcaggtcattcactatgtctcgcaggatgggccggttcccaaccaccttcgtgccgttgaacaactttgcacctgtctttgaaggcttccgaaggccaggcgctgcttgtcgggagcccagtgggctcaatggttcacgggaaggacgagaagaaggcgatttgttcttgcccttacctttggccttcgcagagccaggagtcgaggccgcacccggggacatgagctgcgactgcatggtacgagaagggaagaaatgtttgtctatcgctccgctgggcaagttataaacccagtcttggccttccatcagacgcacgtatttgcagaggagctcgttaccgtcacggagagtggatctgctgccgacaaccaggagcttggtctgggcacgggtgaaagcgacattgacacgacgccagtcgcgaaggagctcgccgacattgttttcagcgttactgcggacgcagctcaggataataacctctttgtcgcggccttggaacttgtctgtagtgtgcatttccagatccggggtgtagcttcgcaggctctggcgaatgagcgagagttggctgcggtagaaggtaatcacaccaatgttgcgcgcgggaacaccacaggcaatgaatgactccacaagttgcgagcagaggaagacctccatgtggttcacgactcgattcccctgtgctatctcgagggctgcagggccgatgggatcggtgttgaccaatcgcgtttttgcggatggcctcagcaagtcttggagccagcaggcgctactgagcgtaccggggcagatctctcgctgggattgtgactgagcacggctgaagtcctcgacatggaatttatcgagggcgttgatgttgggtatatccaaagatcgggctgctacctgcggagtgccgcatttgagacggcccgagtagatcagggtgttggaaagtaacatgagttcctcacacatgcggtactggtgctctaggttgacaaccgaatctggttgtgcatctgagagtagtttgaagagactgacatcaagtcctccttcctgagccgctttattctgcacaagcggcggcaattgatagtggtcaccgaccaggatgaaagtccttgccatacgaatcgggccgaggcagactgggagcgtgatctgtgacgcctcatccacaatacaatagtcaaagatgcgttgattgaaaatgttatggttaacaccgaggcatgtagtggcaacgacctgcggcttttcgtatgaatccttgagttcttcaatggttgatttcgggattgcggcaagatcagcaaattcctggacatctggatgaactttggcggttgcacctatacgcagcacacgaatgtcgtcgtctcgaatctttagcagaatgttgtcaactgcagtgtgagtgtaagatgtaagaagaacactcttgccttgtgcgacaagggccctaataatatgggcaatggttgtggtctttccagtccctggcattccaaggacaagagcgtagtctttggcgctcatcactttgtcaatggcttgtctttgatcaacgttcagattgccagaatcggtgatcgcgtatgaagatgatgttgtcttgaaggcgggtgcctgcccctcaacaatgagccgtcgaagttgtctcgcttggaacaagtctttatccatcatacaaatgaggttgtttcgaacaatggccatgccattgctaaactcatctttgtcgatccgataaaccagctgttcacctgggtcttccagagcagcgggctcttctttcccgacctccatgattcctttgaaagactgatttgtgactgcatcgaagccagccgtccttgaccgtgcattgtgaagtttccggtccacgccaaccttgatgtgtgttgaactagtatgcaccacgtatccgttggcaagagcaaaatgacccttttcatccgaaatgacaatcggttcacccacagttatttgagattcagcaaaggagaaaccaggagacgcttgtcgtttgatgaacgtataatggtagcgatttatctttgtcccggtgttctcttcatacacagaattcggatcaataacgacatccccgaagcatcgacccagggcttctcgttcgctgctcagcaatgtccaaagttctcgccggaacttcacaagattaccttcttctttggtcagaagttcatcccatttacgaaagaagtcccgatcaccgttgttcagatgaccgacagctgcatcgaaatcctcaccaagtgcgctggtctcgccatcgccatcctcggagagcttatggtagatgaggcaaggggtcctggcatagcatcgaatacattggcgagctttcctcaacatcggtggaagctgttgcctttcgcgaatatagccagcgaggtgattgcgcacctggatcatctggagcagttcgtgtcggaccccacggatactgagtgtttttgttaactcgaggtagtagagaagcccgaatgtgacatcgatatctgcaacaattttaagcaaccggtcaactagctgaaagaccattgggggctctgaaggacatctcatgacttaccatagcgatccgacatgagtaaagtgtagagagctgtttgagctctatgtgactggtttgtatcccttcgcccagtcttgagctccagcgggaccaccaggttcttctccattttatcttcacgacaagtgacttggacggtcgcatcgatgttacctttcaggccatacattggggaccagatgtgctcctctacctcgagcaatttgttgatactcaagttcagcttagagttattgcggtcttcgaccatagacttggcctattgatcttgattagcgaagtttcttggccaaaagaggcctcaaatcggctgtgagacacacctgtggcttgagatgcaggaaagcatctgcccagtcgagaacagcaggcatcctgctcatgagatattcaacagcttcaggcacactcatttgaacagagtacagctcttcaatgtgtctgcccatgacggtttcgaccaatgtcttcaatgactccatatcccattggttcgctttgagggcttcttgaaaaacttcgtggaaaaacactccgaaggcttgcggtcgctcgagtgcggcaatgactttgacccgatcttgaaggacagctcgtcgctggcagtctatcgagtctgctacgacggtagcggaaatgagatggtcgggatgaagaatgatcatgtggttcaaattatccacaacacattggccggctgcgttgaagtccccgaccaggtggatatacgagtccttgctgcagggagtgtcaaaccatgactctcgcaagataatagtcttccgctctcgggttttctcatcctcaactagcaaactctgtacttaaagtcagcggacgggactagatccggagcaagggcaaggtatctaacctgctctggctgggtacgtcctttcggagtaacatatgtgctctccgtgatgtcaacgatctggtgacgtttgatagcttgtcgaccttttaggttctatttgttttgactgtcttagcatatatctagaaattaagcgactaagagtgactaacgtaagcgggtcctccttcacctgcttgcttcatagtttgctcaatggcctccagatcaaaatcatcatcaaactcatcatccgatgatgcgacaggtgcagcggttgagggtttgctatgcatactgccattcacccgggcattcattgcatctggcttctgcagagatgggccagtagttgttggctttgatggattgaccggaacgggcttagtgtcacattttgcaagtatttcctgcaagttgtcaggcagatcgtcatattcatcctcatcaaagtcatcgaattcatcgctttttgtttcgttagtcgtagtgttatgggttatgggtatggcaggtttgctgtcgagaattggattctttttcggttgccatgaaggagacttttctgcgttaagggcagcccagccagaagatcccagagaagcaaactcattagatgcatgtgccggctcaatgaaaggatcctccgaggcatcggccaggtccatcagaccttggtcaagatcatcgtctccgaactcggaggacgacccttgaaggacaggcgagttcccaggtcctgctttgtccagcgatgcagcacatggggatatggcggtttcttcgtcggccttatgaagcctatggtccttcgtgggtgaagacgatcgacatcttcgcgcatccatatgttggcgcagaggcgacgatccaggtggagccgcatcggcaggggccatgtgtatacttctctcgatcttctccataagatagttgatccttgaggactttggtttcccagactcgacattgctgctggttcgttgaaatgtgccgcgattgggaccagcatctggtctattgactcgtcgtcgtttcgttcgagaggtcgggaaatcggtagtgcagctaatcgcgcgtctcagcccagacgaatgtcgacttgttctgcccgaacctggtgtctggggcgaagaggaaagaagatttgcgaaccgtggcggtggaaggtcgtccgggccatcgaccatgtttttatccatgtagttattccacaattcagcggccatatcatgctgcggtgtcttgaaaagggcttgtattgaatgaagatcaaggggttctttttgcactttcttcttgttcccgttcgagggagagccagcaggcgaagaactgtgccggcgcttcctgcggcgactccctggtgtctgggacgaggtgtctgggttcgagctggcaggcacatgctgccagatgacgtgctcgactggcgtcacctccgggcctggggcaggatcaaacgaatcctcagcgttgctgatcaaatccgccagaggtatcctgtttcccggagtctgagggcattctttaatcggctttggttcttgtacttgcgattcagatgcttgagcgtcacgggacggaggacatcctttgtcagaagacgtctgcatcaaccctggcacactatcggagtcagggtcttcatgttctttgctcccattgaccaatttcgtctcgtctttcgaggtagcgccgtcgggaactccttcgccttcttggaagcgaaacgcgttcaatttcgttcgtgagtttgaggatatggggtatgcattatttgttgccattgcttcgattcggaaatatccaatgacgcgttcaaaattggtaaggatacattccgcgggaagctggagcaggacaacgtcagaaatgggggtatattgggtgtttgagacgaaacataccagttaagagatggtatttaccggtttaattacttccaattttcgtgcatatgcaaagatgaaacgaatggcgagtccagcgccttgttggcgggcatggggagaccagatgtgataagaacgcgtcgcgtgtttattgctgacacccagtttttaaggcagaagcacatatgcctgaaataccaggcgtaaaggcggacaagaaaattgcccaatgtagactagcgcgataactggacagcttcccggccttttacggcttcaacatcaacccgccgaagcacccctcaacccccctgcaagaggcaacatatcaattgagattgtccttgcgacttgaatttaagaggatattctgtcccttgtgacccacgccaatttcctcacacgccagtgtcccttcggttggcctcaaccctctctcacccccatcttcaagatgactgcccggccattgtcgcacatcctccgggcgcgctgcctgcttcgccagccccagaacacccaggcattttcaactcgatccagtctccgtgccgcggaccacggtgaccactacgatccccccaccggctggctgttcggtgtcaagcccggccagaagtacgtgaaggaaggctgggagaacatttggtactacggattcattggaagctttttggtcgctggtgtcgcatacgttttcaagcccgatacctcgtatgtacaatcactatcccgatctgtcgcctcaatattggcgtcttatgttcctcgcacaactggaatactgacaattgcaatagtatacaaacttgggctcttgaagaagcccgacggagactggaagctgagggcatcctcgaggaccctgacaaggtcaagaaataaacgccaaatctgtacgctgtacatagagatcaaagagggactatttcgatttatgcctgtactacctgcaacggcagatatgatgttccggtctcgttcttagacaggttttcttttgcatgctcatctattttcgtttgttccttgttgtatcactttacacttttcgaagtttctttaccgtcatgttggttataggtgctctggtcgcaaaaatgcttataattcgcactgagtacatcatgaaatgatttaagttaaaacagcatgaactctgatatctcataggtctttgcgaaatgtactgcagaagtagaagcgattggtattagcctcctcgctgttcacataaggtcctcagatctctggataaagatcatttctccgaagcaagggcatttcacgcctaatctttgccacaagatcgagatcaatgtcggcagtcgcaatttgtggttcttggtgctcatctcccagctttgctaccacttcaccccacgggttgacgataatagaatgaccatagcttcgtctcttctcgttatggggacctgcctgggcagctgcaatcacatacgactgggtctcaatagctcttgctcgtagcaaaggctcccaatgagcctttcccgttggaacagtgaatgctgatggatatgtgatgatttcagcatccttccgcctcaatgccaggccgatctcaggaaaacgcaactagataatcgagcaggagtaagacgttgatcccgctggtgtccgatgtaatcgcaacatgcactgtacttacatcaaaacatatgcttagaccaacacgtcctataggtgtttcaaacggcgttggaatttgttgtcctggctggacgctcctagatagttgaaggtcagcgaatgataagccaactatcggatcttgtatccaaagataggaaaagcttacgcgctctccttgagcacaggtccatctttgatatcaacgtcaaacatatggattttctggtatttttgggtaatgattcccttgtcgtcgatccagatcaataaattcttgagcctggtttcagaagctacttcatgaattccgacattgatgtggatattctgttccaaggcgtctctctgtaaagatgacacaaagctagtcctctcttcagacccggcgagagaataggattgctctgccgaggatgcgatatagtccgatgcctcgggaagaaacagcacctaacatatatgagctgtctaccagagagtgggtaatagaataaataatactaccttggcacctgctgctgcagccttccgaaccaacaccttgcactgagctaggttcgaagttatgttgctagtcgagcatagctgccccacggcctatatcaaaacaggttgtcagaccagtggctcacgcccaatggatggtgtacatactgctaaaaccatagtgttcaaattttggaatcagaaatgggtctgaaagcaagatatttacgagaaaatctgtctgtagcaatcaaatggcatctttcgaccccaaagcgacgagcccgtatgctgactcagctagttatcgcgatgatcagcgataacctttcttcccgccaagactctcacctcggatctttcacaagacacgcaaggtttgacggattcagcaactgctagacggtagaattttatcgtcgcaatgaagagtttaaggagagacttgtctgccaacccgcaggccgcaaatgttaccagcaaggtcttcgttaggtccacgaaaagtggaaaggtgcaaaagattgtccgcgagctctatttgagagaagatattccttgctcttctaagctttgctcgcaatgcccgacgattgcgccggctgatgcaaatggaaacagtaagtaaattattaccgcgatggccaagcaagttgctaatgcgaaacagttgcgccgttcatcctatccgatcgccccgccggcacaactgcattcccgcgaggccactaccttgtccccgatacaaatgcgctgcttaatggaatggatcttttcgagcacactggggccttttacgatgtgattgtcctccagaccgtcctcgaggaattgagaaaccgatcactaccactttacaaccgtcttctagccctcgtcaagtcagacgaaaagcgcttctacctctttttcaatgagttccgccgagagactcatgttcggagaggaccggatgaaacaatcaacgacagaaacgaccgcgctgtgcgcatggtagcaagctggtacggttcccacctgcaacaatcagcgaagaagggcaagaaagagaaggcgatcccggcaattgtggtcgtaaccgatgacaaggagaaccttcggaaatgcaaggaagaaaatgtgacggccttgtcgctatccgactatgtctccggcttggaggggtccgaaatgttgctggacatgatcagcgagtcaaaggatgcgcgagattccaaagaaacaacccgcggggaactattctaccccgaatatttctcaatgtcaaaactcacaactggcctgcgggccgggacattgcaccaaggagtgttcaatgtttctccttacaactacctggaagcctccgtcaagaccgcagctttcgacaaacctcttcttatcctgggccgcgataacagtaaccgcgccattgcaggtgactctgtcgtggtcgaagtactgccacaggaccagtggaagagcccctcgactaagattgtggacgaggaggccgtgacccgtaatgataaccctgatactgaagagactgaggctgtggtgacggatagagaacgcaaagctctccaggaagaagtcaaaaaggcccatggcaagcatgcggagggcaggccacaacctactgccaaggtcgttggtgtgatcaagcgcagctggcgtcagtacgttggtcacgtcgacacgaattctactggttcacaggcgtctggcagacggcaacaaaacgttttcttgctgcccatggacaagcgtatcccgaagatcagagtgcgcacaagacaggccagcgatattctcggtcagcgtattcttgtcactatcgattcttgggatcgcgattctagataccctactggccacttcattcgggctctgggagagctcgaaacgaagggcgccgagaccgaggctctattgcttgaatatgatgtgcagtacaagcccttcccgaagtctgtattggactgtctcccatctgaaggacatgattggaaggtcccagtctcgaaggaagacaagggctggaatggccggaaagatcttcgagacttgcttatttgcagtatcgatccacccggctgtcaggatattgacgacgcacttcatgcgcgtgtcctgccaaacggaaactatgaggtcggtgtccacattgcggatgtgtcgcattttgtcaagcccaacaacccaatggatctcgaggctagtgttcgtggaaccactgtttacctagttgataagcgtatcgacatgctcccgcatcttcttggtacagacctgtgctctctcaagccttatgttgaacgatatgccttctcagttctgtgggagatgacacctgatgccgaaatagtgtcttcgaatttcaccaagtctgtcattcgttcccgggaagcattcagctacgagcaagctcagttacgcatcgacgacaaatcacagcaggacgagctaaccgaaagcatgcgcgccctcttgaaattctctaaggttctccgtcagaagcgtatggacgctggtgccttgaaccttgcgtccccggaagttcgcatcgagagcgagggtgacgaagtgggcgatcctttgacagatgtcaagactaaggctatgcttgacactaatagcctggtcgaagagttcatgcttctcgccaatatcactgttggctcgaagatctacgagtcattttctcagactgccttgcttcgtcgacacgccactcccccgcctcaaaatttcgaggaccttcaaaatcaacttttgaagaagcggaacatggaacttgatgtctccagctcgcgagctctggctgagtctttggatcgctgcgtcgatcccaacaacccgttcttcaacacactggtccgtattttggcgacccgctgcatgacctctgccgaatacttctgcgcgggtgcgtttaccgaatctgaattccgtcattacggtcttgcctcaccgatctacactcatttcacctcccccatccggcgatatgccgatctgatggtccaccggcaattagcttctgccattgggtatgagggcgaggatggacacgctgtcatcgagggtgtcaccacccgcaacaagctcgaagacatctgccggaacatcaacgtccgtcaccgcaatgcccagcatgccggccgcgctagtattgaatactacgtgggccaggctctcaaggcccgcggagagaagatggccgccgacggtgttgatgcgggcattgaagaagaaggatacgtgatgcgtgtgttcgagaacggtgttgttatcttcgttccccgcttcggcattgaaggtgtcgttcgtctggaggacttcgtcctgcccggtgaatccggagctcgttccgtggccgagagacgggagctagctcctcatcgcacaacggagtttgatagcgaggaatacactcttcgtgtggaagagaagggtcacccggagaaggagcgcagtgtgactgtcgaactcttccaaaaggttcgtgtcaatgtcagctctgtcaaggaagagggtcgtggcgccggcaagagaagggtccggattctggttacggaggcatgaacaaaggctacatccatgtagattacatctagtgttaaaacggcgttcaaatcaaacgaatgacagacgattgtctatttttgtatgttcattttggctggcatatctgtgctctgcgctatgcaactatatttagaccttcttcaaagtgatcattctgcgaaccaagctgatcggggcccataacggagcacctgtttcagtggcctccaagatcggggcaccagtcgcagggcggttttccttctcatttccaccatgagttccagtcaacgggccaggttggacggtggaatcagggcgtccctgagcaagctccaactcgccgaccttccaaccacgcacgatccacaaacatatggaagcaccgacatacataaatccagtaaatatctgaacgcgcaagtatgaagtccctccaccaacattatggctgcggagctgaagcgcgatagcttcggagacagtacaaggggcaacaagcgtgagccaggtaatacttaagccggaaggaagatctctgataccaataatctccgccagcacgggggaaacagtagcccaatacgtgcctgcgacagtgccaaccaaaaccgcgaagaagcataccacacccatgctatcagcagaagtccagatagcgagacagaatagaccgcagaggaagctgaggaaagtagcgatattaatgcgaccaagccggtcactgaacatgccaacaaacggacgaccgagaccctgaccgagattgagcagcgcagagacaatactcccctggtgtggcgagagaccaacggagagagcgaagttggcaacactgaacagcagcgccacatagccgagcatactgaacacaccccacccgaggaagagcaaaaactccgggcgacgcagcaggggcagatggaaagccgtgaatctactgccgacggccttgttgcgatctcggagcaagttacagcagaccaggttcacgacgcaggaaatgatacccaaaatgcggaatgcccagcccaacccatagcgcgggatgatggcacccactgcgagggagtagatcaggccgccgagaccagatccggcggcgttgatgcccatcgctacaccgcggtgcttgtcgaaccattgcggggtgataccgacactgcccacgaagaggaagcccatgccccagccgaaacagacgccttggctgaggaagatgtgccatttctgggtcgcgaatgacgaccctattagagagagggtttcgaagaagacgcccaggttgagtacaaatcgtacaccccatttgtggatcatgtgagtagctaatggggccaccagaagggcacaggagatacttaagccgcctgtgaaggcgtacgatagggcagatgtgttggggaatacattatgtgagaggtaatggctcagaaagactccgtagctctagtagttaaacctgttagtaagatgatagtgaaaggggaaagatatatgacccacgctattgataccccaggtatgcgcattaatccagaaaacacaggcaacgcagacccaaccatagccaccgtccggggcaacatcgcgcttatatttttcatcttcatcgacgtctagtggcgccgactgcgggtgcgatctctgttcctgttttgcactctctcggtccagatcgtcctcgcgggaacggatgatatcaattggcacattatctgccatggtagctcagatacaagaccagcttgtttatgagataacgagcttgttagaagatcagaattggttgtcgtttttgtcacgacatggaagcatgtagtgaaaagaagcaagagacccaagttagtacgctaatagaaaaagggactagatttcgaccagtttatcattggtaataattggagtcatcggattatcggattatcggacaaaacgccgaattcaagggaaccttggaaggaacattgttcgtatagaggaaagatgtccagggcctcgtggttgattcttcctattcggcgatattcaaccaatgaaggaagttcacagctacattgcatcgaaagctgtgcagctctcagtcagggttgcttggctgtggggtatcttgtgccgagaagccgatgcggagagtcccagtcgagtgccagtcgaagccaagtcgggcagatgtgggggatcatttttagtcatctcaaggattcaggaatgaatgactgagtttaattagacaaatgtatccatagggctgagtctctatcaagtattaactgctatataattcgaaatgtatgctacgttgtccaatatagggcttaatagggttaaatacaaccaagcccttatcgacacgtggacagataaggaatctgagtcatccgttgcctcgcgacggggggtttgtttgggaggggggaaacccaatgacgctagccagctcagaccgtcaagtgtagatcgcaactagactcttctcatcttagtccatcttggtccctctttcctgtacttatccgtatatctcttcatatccttgatccttgcaattccatgatgcataaacattccactggtcacaggaaggtctcacctcctggcccatccttcatgtccaatgatcaagtttgtaagtgaatctttggtcttgcacggatcggagctgatatgagtcaaccagcatcatacttgaaggacctgcgggcaaatcgacctgcccgtccaacaggatctcgaccatacccgggcagagcagccacatcaactagcgatctgcccgatagtcttcccccaagggcatcctcggcattttccatgcataaaccagtcgaagatgaaattgaagatcaccgacgctcaggcagtgcaatgtcccatcgccgggcgaattctcatgtgcccagcggcggggcaatgggtcgtcctttagctcaggagccacgcacgcactcaatccggaagaacgtgtttccagcagaaattcatgcacgtactattccaatcccagcatctccagctctgtcgtatcgtgaaaatggtcaacggcgacacgaaaaggaagaggcacgggcattacgagatgccttgcagaaaatggatgttgaggacgacatgagtcttcaccaagcagctcaggatgaggccacagagctagtttggatgcatcaaaatcctggtcaagctttcaaaaacccttatgcgccatacaaaaatcccgatgccaacaggcgcagccagagccctgtccgaaatgattcccgagcgtataacctctcgacaaatagatttagccagtcgacaggctcgagtgtatcctccgatggtaactctagccccgagtcgacgcggaaacgatcatctctggctggaccctctaagaagaatctcaaagttaactttaaactacctgacgaggaacccgagcagtctgtcgctcccagttcgcgaactgtcagcggtgattcatctaaaggaatcttcaggaaccctaacgaccaaatctacgaagagcccaataatactcagaaggaacccgaagcaaaaccagacttctctaagtctgactcgtcggctttgaaaaacaaaccacgcaacgctctggggcgtgttcccaagccattgccttggttgcagaatagagctcacagcagccctgtgatggataagatctcccggtttgaaatccagaaaaaccctcccacccagtcgcgtaaccccggctacactcgaaacggaagcgctactcctcctcctactcagtcaaacaacgccggttacactagaaacgagcgtgctactccgactcctccccttgaagaaaaagatcagcctgtccccaccgaggatgtaagagagagacgcagcgacgatatccgcgcagctaccagcaaaaagcgaggagaccgcagtgaaaagctaccgatgccttcagccgtcagtgatcgagtcgggcgcccaatcgtgagctttgaccaaagttggaaaccaaccgagcagccgaaacctgagcgtccaagcctacccgtgattgaagtggcaacaccgaccattgaagtctcagccccttcaatcgaagtctcagagccgcctccggtccccgtgatcaatgtcccggacaccaaagtacccactatctctgagatagaggctccttccaagcaatcgaccagaccggtgcctcagccgacgagaaacaacccaactaaaccggctttcccaagacagcagggatctgattcgcagagccgttggcactcgccctatacgcgatctggtgtcccgactgcaagctgcgagctatgtacgctttcgattgccggaaaaattgtaaccgctggcggatgtcgattccacccggagtgcttcacttgtttccactgccacacagccctcgaatgtgtggctttctaccaagaaccggaggccagcagagctgagagattagaaacagaggccaatgaccttgaggcccgtgtgccacgtttctactgccacttggatttccacgagctgttcagcccccgttgcaagagctgcaagacccccatcgaaggagaagtggtagtggcatgtggtgccgaatggcatgtcggccacttcttctgcgcagagtgcggtgatgtatgtgactttcctttctggtgatttcgaactcaagacaactaacaatttctcctcatagcccttcgattcccaaactccctttgtcgagaaagatggcttcgcatggtgtctccgctgccactcgcgccggaccgccccaagatgtctgggctgcaagcagcatgtcatggatgaggttgtcatcaccgcaattggtggccagtggcacgaacgctgcttcaattgtcacgagtgcggtgatggttttggtccggagggccgcttcttcgtccgcgaaggcgagcccaagcgaacagctaagggccgcatcatcggtggtcccgtccaattggctatctgtgagagatgtgaaggtattcgtctcaaggcgcctgggatgtgctagacttttgcgccttctagtcgtggggctacgaccaccacgatttaacgagattactgcttttatgatagattcatgcatgatgtcggtgtttgattgttgcatcacttgattcttgatttgtctgcatgtgttctacaaccctttttcgggtccatttcgggagtttgttcgtttttatcttgtgtttttgttagcaagcgaagattgccagcgatgttgcagtatgatatcgccaatgcatttagaatgggtgaaaacgcctcaaaacacctatcttctcgtcatatcattgagatcaatgattccaataacttcccatattctccgttctaattaggtatctaattctctccgctccttttcaagcaggccactcgggatcagctttgcgtctgaaaacagcaacatacttgtttcccttatttctcgtaactttcttcgactcctcggtctcgtacttcataacccgcacacaaggatcaagagcaagctcctcctccgaaacccgttcgaacagatccttactgctcggagcaggagccgcaccctccggctgctccccatgcaggaaatgccgcagaacccagtggtgatactcctcgacatcggtaatggtgtagagcagaccgccaggccgcaaaacatacgcatactcagaattcagagactcggagacaatacgggccttgtgcttacgggccttaaagtgcgggtcggggaagcagatgaagatcttggagagctggtggtggccgaagaagttagggaggaacttcatagtgttgctgcggattgcggtgatgttttcgaagtttcctgggaagattttctccgtgccgatttcgtcgtcgttggatggggcgggggccgttgattctgtgccttcgggttgtgccgaggcgtcttggagttcggttgatgatgggttcgcggctttgttcttgaggcgttgttgttggctgcggagggcgtggatgcgagagctgaggtattcaagcactgaggtgcggatttccatacctgtggttttgttgttagttttgtgttgctcgttcagcagagtgcgatgtgtatttttgtttcgcggcgctatacttaccgaccatcagggtatctggcagcaatggcgccaggccaaccatcagcccgccgaagccacatccgatatccacgacttcgacctccttggtcaacttgcgccctccgctgaggttcgttttcgaggtatctgggtccacgaatgcagggaaatgcgatgaccagtccatatgcgcggggctgaggggactattagagtaccagttagctattagttcacgatcggattgggaattgtcgccagtgaagttcgggaatcccgcataaatccccctagaagaaatgatctgacgtgaaataggcaaaagaggatacatactactccagccggtggtcagagaagggattcgcatgcgcgcgctggcggaagaatttcttctgcggcatcttaatgacggcatcggtggattcttgctgggcctgtacattgcgacggtactcttcgcgcttgatgcgctttgcaggtatcttttgggtggccattttgaattgacaaaggtgaagagagaaatcgaaaaggtcgaagtcgacgaaattgagaaaatcccggccccaccttttactccacattggagtctctttactttctctcttgttctcgacttcctactcgtgttgtcttttgacttcattttggactattggggctatttgatattaacttttcactcttcgctctttgatcctctccaacatgacaacaacacccccattcccctttccaccaacctacaatttcccccccttcttcaccccgcaaccaaacacaacaacccgccacgcgcagctcgagaaatggtcgtctctaatccagtcctggtgccggcatcaccgccaataccgcctctccctaattgacgctgttgaatccccgctcttccacaacacagccctgcgcaagcgccttgatctacgcgaggcccgcgcggtcgtcgactggatgaccaagagcgaagaggaaggcggcggtgggcggcgagcggagtggatccctgatgctggaggtgcgtcttcactggggttgggaaacggtgctgggcaggggccgaagaccgttgcgtggatttggtggaggaggcctgaggaatgggcggatgtgttagttgactgggttgaaggtactgggcagaagggctcagttctgacggtctacgagctgattcatggagaaggggccatgtcgcagggtaagactcctctctttgattattggtcattgtgtctagggttgtgctgatccgcgtctacagagttccatggcatggatacggatgtcatgctgcgctcgctgaatgtcttggttaagaggggcagggcacagatttttggtggtgaagggcaggagggtgtcaagttcttttgaagagctcaagatgagatgctgggatttctctgagataaatcgtggctattcgtgacaaaaacaaagcgcttatcatgtccaggtcaaaagacatgtcaaatcacgtcgccaatactccaaacttatacacaaaatccatgttcttgggttgaaagccctaagtggatgaggggtgtggactcaataccttggtatcagtctactggtctgtgttctcaatcatctcctcagtcagctcgtactcgtcggcagtacgtgtctcctgtgacatggccatgtccaggagccagtcaactcggacgatccgtggagttttcttgatatcgagcgccacttgacggaaccgaggccagactcgggcgtgattagctccggcgctgctgagaagaaagacatccttgcgggcaggcttgtcatcttccccttcgctttcctcgtcgctctcctcccgccgggaatggttcgctatggccagtcggccacggaaaagcatgcactctcctccgttcgtttcaacgatcgatttgaatgcatcgaacccgcctcgaatgtcctcgacgcaatagatgcgatagccctgcagcattttattcttgttcttcttcgcgtttcttgtgacagaagacagatcgaaattgtacttcttctcagcttccttatcatccagagggaaatcggaggggttcagcagttcctccttctttaggcaactggcgataaagtcggtgctcacgatcatcggcgcatatgcgagtgcattgacaaacttagtggttcgtaagatcgacggcgcagccaggtgagtgcatcgtctggcatcttggacaaccataataccaagatctcggaggcctcgctgtgaaagtgtcagatatagatctcgaactaaatcaggttcataactgctgtagccgaacaaaccttgtctgcgtcctcaatcttctcgttgcccttccctacccatctctgatagccagtaatcaagaggtgcatagaaattggtggccgagactttttctgtcgtttagcctccaccgcttgctcgcgatcgctctcatcctcagcttcaagtgaggcacgcttcttgttctcctgaacccggccctcgtctgactttcgtctgccaccgtagataacacctcccacgcgtttcctttccttttcatacaaggcaaggtccggggcatactcatggagtcgggcagttgctgcctctttcgacttgcggctactagtcgatgacggagtctcattttctttgccctcggacatgattcgggttcgtgcgggtgtttggataggtccgcgcgactttccattaccctgcggagtaccgtgcgaagtttccgaggcatcctcattggtcttccgtttcttctcagcgggaggctgcactgagaccatattttggttcttgctctgcattgcgcgccgcgggctatgagcaacagcctccccggacgagaaaaagacctgttccaaaacattgcggtcgagctgggtctggcccgcgacttctccgagattggttcgcagagggaaatagctgtagcgcgggtttgaggccggctgcagcttccattttgcataactgtcctccagccacaggtggttgacaacttcaaggccccattccttcgccgcgttgcatttctcactcgttccatgcgccgtaatcagatgggtattttcttgttttaaggttttggtacattctgcacctgctgctgcgatcaaattctccaagtagattcttgcttcgccaacataattggacaaactgattttcaagccctcgaacccgggaatgccagtgcgggagatcgggtagtgcagtagtcttctgaggggtgaagtatatgtgttaaatgtcatgaggcggtagagccatgcgagatttccaacgtctatgttcagtcgcgatgccgtgcgatacgcaaatccttcccggtaacgacatattaacatgtctgctccgtcaacgtttgatgtcattgtggcaccgccttgttcaaggacagcttgaatcgattcctgcaagtgcgagccgattccaagatcctgcgacagcataatggactttccttcaaagacactccgttggcctgagttataggccgaactgggtggcatgggcagcttagaaggatccgtagtggatgcgccgaccaaatccttattctcttgccatcggattggagtatcaggacccacgcgcaagatctctggatcgggaagtgtatatggacgctcatcgattcgtcgaccaagtttaaggcagtcgtcgaacctgttctcagtcagcgatggtcactgtctgctgtgccaaggaaactcaccagtgcggtagtacaatcttcacgttcagtttcttcgcctggacaatgcgtgctttgtcggaatcggccgtgaggtccaccaagtgtgtaaccatctgagagactcttggagagtacaatccacctttcgcgacgacgccacctatgattgcatccttatctccctcggttatgtcgccgcaggtaacgaccacgtcgttcatgaacagacgcgggtctgggctgtattggcgggggttggccagttttcgcttcgtcaatgagttattcacccactgtggcttcaccacagggatcagcgcatcacaggtagtatcgtaggcttcaaagtcaattgtggtagagatcaaatggctgaacttggctacatcggggacttcggcaccaggttggacgatcagaggctcgccgccgttttgctcgaggagagttgccagctatgcgattgtattctgttagtctagttcaggctgtatcagtcgcaggaaaatacgtacctgctccgccgattctctcgagaggtccttagagcatacaatacagaggcaacactgctcgaagagcttggactctccgttttccgttgccatggccaaatttgtagataaattatgcgattgaagattggcttattgattgggggaatctccgaggagtcacatccaagggtagaaccaaagatgaggcaatcggggacgcgcccacgcgtgtcaggaacgccgaatcacgtgtaccgtaccaaagcgcggggatcgggacccgatagtgtctgatctatctacaacataactagtctacactcaagtagtatgaacgattgccaaataaagttgaattcgatctatgttcttgatccgacaggcctaggtagggcatttcagacacatttcgacaagcacactcatatgaaactcgggcaatcagatcaggtgcgaaacacccatagtctgattggccgcgacttccttcctcgtccatactcagtccatttcttcgggcatagggccatatgccgcgtgcagtttgcttgacggtagatacatcccagcgaagatatcagtggcagcgtcaacaggccactcctcttgctcctcgggctcggagtcgacctcgaagacgacctcggagacagacgtggtcacaatcccgcaattatgttcagatccagatgtggaaccagggttatcattggggccatttcccgatgtgggttcagtcagagtagactgctcacatctagaggatgtcaccgagtcttgatcaccgggtgttgacggcacaaccaagggcatcggttgattgggagaatgatgggtcaagtgcttaatattgttaatatactctctcttggattcttgctaggagtacacttacattcatgacttgagcccactctcggtgcccgggtcgatgaaattgggttccgtactctgcagcaaactgggcatcgttgcgcctggtagaacgaatgtcatcagtatatgcctaattccttacccccgagagtaacgggagagacacacgcaatttcctccagaacaccacaatagtacccaatcggagagtcagaaatgatgtccttggtaggttccctgtaataaatggcatcacgccagcctcccattaacacccaacgtctcatcgcgttatctccggcagtttcttcctggatgcccaggttcttcctacttcccgggttggctatacactatcagaatgtactcggaatatacagagctcaaaacaacggagtacgctctgtacgcatcggcaccagaatgctgtgaacgaacatgacgcagcataccagcacaacccctgaagctcactccgcacatcacagtgccgtgcaacgagatatcacaactattttgattagcctagacctgacacaaaaagtcgaggtgtttgtatgatacacgtagatgttatataagttcatggtgaccataggagcttgtaaactatgactagcaagagcaagtgcgacatcttgcttcgtcgcgtgtccagtatgtgacggttgaacatgccaatcgagattgttatttggaataggtcctgtaaaggttcaatataatgccatcgccaaagtaaattacctatactattctgtacccaccgtgtacgtagccccaaaatggatgggggtttactgcatgcagtacatccggattgacgaagtcgcttttagataactgtggccgagctacctggcggttgttcatggtggctcgcggatgagcttgcaacgaagatgcgaaaggaaaaatatgggcagggtacaatgatggcaaggaaggagaaagcaactgccatcttggagcctttctatagacttgttgcatgtagcgggcaaacaaggaggagcatgtccggaagaggtcttggtcgggcaagttccccgtatgttcgacaggggagtgtggtcaacacgtatgtccctacataacttgcccgcagacagtctctccattctataggagcaccgtttaccagctcccccaggtgaatatcaaaatctaatttcctgaaaaccacatcccaatatgcacatgtacacaggtatgtaggcagcttcaagcatacaacgagaccagttaccaacagatgctaaaggcgaagttttaccacctacaacgatcataaaagaatattcgtatacatgcatgctttaactgctatgtatgaatgaatatgtaaaattaaagagctgggcaatatcaacattcaacaaatgaggcccgacaactcgctcagataaccaccaagctagatgcaaatagcgaacaaaacaagaaaagaaaatcaagctgccatcgtcaaaacgtacgaggtgatactatccatgcgctccgtcgtcaacttcaagctaacagtcaacagctcccgagcaatgcgcggctccttatcctgtaatgccttccactgcaccccggtcaaacaccaagccacacagtcccgctcagccttgaccgtcgctgtgcggcgcgtatcactgaagaaaggcagttcgccgcacggtcgaccagcgactatgagctcgaagtagcggccttgtgggagatcgtagccagcacgcagcatgccagactcgaggaggtagaaggcgcgcgggtggtcaccttcgtggtacaggactgtgccagcagggtaggattcgcgggagaagtaggcgcaggcggggaaccaaaagtcttcattttcgattgagaggccttggaaggtttggaggagtaggggcagtggttggcgcatggcggaccaggcgggtgaggccatcattgctgtttcgtgggattgaatggttgaggtcgctacgcgctgcaggtactggcggcgaggtgagctgacgacgttgtcggctagggtggggggtttgggtcctggaggcacggggactgaggcggggatttgaaggagctcagagtttgcagttggctcggtgggtgtggagagtgcttcctggtggctgtagaaaactttcaggtagttattctcgcagaactccagggctgagttgaggtcttcgaatatagggacactggactccgtctcgaagagtcctacgttttgtagggacttgcctacgtcaccttcgacatccaagccggagatggctatctgtacgttgcgcttccggaggacgcggttgatgcgggtaaatgcttctgcggccgagaagtcgagtccgtagacccgagaaaaatcgagaatgatgaatcgaatgggacgccggtcgaaagcttcctcctcgatcaggcctcgcatggtgttctcgacattcacgatggttccaaagaagagatatccaccaagcttgatgatgagggtctgctgtccagcttcgcgtaggaattgctgttggataggaggacgtcggaccgtcgacccggaaatctcgcccgagaactttgctcgaatggcagatttgcgagacgtttggacaacaaagttcacgcaggccagaatgattccaacgaagattccaaccacgaagtcccaagcgcccattgtaacaacgatgataacgacggttaaatattcaagccgagtgagcttaccccatgtgtccaccaatgcctcctgcaaaagctcaatgcccaacaagaaaatcaaggcaccgacaaccataatgggaatatacccggttatgactgggccaatggccataatccctgcagtggctgcggccaacattaaaccggccaaccgagatgatccgccacttgcaatgaagagaaggctattggtgtaaacaagatagttctgcttttatcagctcactaaacacagctctaacgatgggagtctcatacctgaatgcttcctacaaatcctgaaagtgcattcgtcacaccatgtgccatgagctctctgtcgacgttgagattgtcttcaccggtggatatacccagagcaggtacgttaatgggcacatgaagcacaccaaagaaggtcaaagcgaacatagccgggattgtctcaccaaaggcagtccaattgaccgccgagagatctgtaacgaattagcatgaaacgcccagagtattgtagccaatctactcaccataaagagaatagaaatgataccacgggttgttcgaagatggggcatcaaagacccatccgttgtggcggagagcacccatagagatccttgcgcttagaatgacaatgtagaacactgcagcaacagcaataaaataaccaccgacaaggaagtttgagcgaacgaatcgtttgagaacaagaaggccaatggcaaggaataggggtatcatccaaagagggaaagtatcaaggtggaaaagtttctggatcgtggggaggttgtactcaagagacccgggaagccgagctgaaacctccattccggtttgtagaagaaagtagcccacgccaccgatgcacccgatgagaatatgacgtgggaagaacccaatgagcgagcccagcccacagacacccattaagaagaacaccaagccagtgaggaccgaactgaccgagaaagctaagatggtcgttgcaatcacggattccgggttgtccttgccgattgagttcatgatcgtgaaagccatctggtgaaagaacggtactacttcgatcatttcacttcctattcctcctttgaagatcgagccgccacaggagaataccacctgggagataatggtactaacatagaacatcgagataccatcggttcctaggtgagcgaacagaggttctcccagagggaacaagatcattccataggataaggcatcaagaatgttgagaagcagtcccagcaatacggcaggaaccagactggcggggtataatacagcctctttccatatcactcgcctatcccatgactttgggctcaacaggacttgagtacagagggcgacagatgaaatgcctttctttattaagtttggtgatcgtttgacagccggcctttggttctcggcgtcgcctgcagttccataattttgtgtagatttggatcgcggtttcgataataacgaggtgtgctcattgtctcgttcgggttcctcatagatcgtgggcggcggggggaaggaaatatcatccatcccgggttgcgtgacctggtcctccacggtatctgttgatggacggcgaatcatttctgtcaaggccgaagagcctgaagcggaagcagggtcgacagaggcatatcctggctccgacaacgcctccccgacagcatgagagcttgtagcttcatcctgggagtaacttgcagaattctggctgccgtggaatatatcaaggctggggggcaagccaggcccgtccctcaagagggattttttattcagcgaaaggccataggtagcgagttccgcggtctggtcacggagaccgtccgaagcatactgagccgggtctacgataggtccaatagtcagtaaaagtcgcgcagtatctctagcagcatattatgcacaatgacccacccatattgctattgaacgaccggtggtaaaaggagcggtttggtgttctcattgttgatccgttgtagctcgatgattccgctcccattggaccgggtgggctgcctaggtttgcatgttccaccagcgtttctgacggggcgttaccatggatgtcgcggtcaaacatcaggttgcgtgacagcgctgatgcgcgagagtcgcgacggccacggggttgcagaacccccatggtctctcgcgcaattgccgtccaaccaagtgttggagtgggaaaagttaagaaatccggaatataaacggggccactagtgcatggggcggccgtttggacaagatgacgcaaccgggacgagcatttcacagaagggggctcagcgacctatatgtatagaagagacaggtcagtcacttatcgacacaaatataaattagcaacagatttagcaacagacaagatagaaaagatcccccgaagtaccgggagatttttgactaaatgtctcttatctcaaaaacagtcgagctaaaccacatccggactgatacgatggaagataagtgggaagtggtccgtgcgaaggaacttcggccatgtgggttaagcaatatctcccaagggcttccaaggtaatctcttcaacgccactaactcgaggctaactcgaggctaacttgagaccaactcggcttttgaaactacatatgcaattaaaacagtatgcagcaagctgcagctccgtggtcggaacgcagtgctctacggtgcgtgatcggcaatagcaccatgcagtagcctcagccttattattccttgcataacgccataaaccaaatgcccttgttaatgatccatcatctaggtttttaccagccatttctcgaatgcctaaatgtatctactagcaatctagcggtgttaaacaccaatagaccaaaatcgagtaaaagttgacttgcaatagataatgtttatgtcaactcaatgggaaatataataaaggggttcattatgagcagtctcatggacatgatcaacactgtcaaggtctaacacgaataagagtggcgaccggggtatatgttcgcagcgaggaagcaagtctggccgtctgggcgatatcctcgaaggaaaccctcaatctttgacactaatggacgtatagacaccaggtaagctctggagtcgagaatgctgttggggttatcaccaagtattcgaattgcggttggatcaaccgttcaaatgttggaaggaaattctttatggtatctgggatttcaaggtgattgtcaagactgcgtctagactctgtcccaatgggtcttttactataggccaatctagccctagagaatagactcgagaaaaaaagccactggacaaaccagcagtcgtgcataatcagactggtgtcacagttacaatgcagaaaatcatcattttcgccgttaggtccagacacgctaacggcgggggtatctcaaagtacatggtcccttcgtaaaaccactgtagatagccaacgccaattcatgtttcttgtactcatatagaacctgaagattccaggtagttccgactcaattcaagtcaatcgctccaggaaaccctgagcaattagccgctccacatcaccctgacgaacataaagctgactgttcttggtcaaattgatcacactaaaccggaattagccaccagatgcccaaagcatatcagagaccgaaaaaaaaggacatacccatattctgtctgaatctcaccagcatccttcaacacccgtacatcaataaacagatccttcggcggttccagcgttcccgtcaaatcgatatccgtccactgccccttatacgcagcaagcatatccccgtactggcggaaatactcctcctcctcggggctcagcgagctatgcccgctagccccaagagccgtgtgctgcgccgccccgctgtcctcggacggctgctgttgctcgaggatatccactcccgtccagcacagctcctcgagcttctctgtgcgcacgcggtgatacgcgagcaggcagcgcttgttccggcgcatgcacaggtggtcgacgagtagtgcgcaggcgatggctgggtcggccgaggggttgaatccgccctcaaaaggctctaggaggcgggtaacatcgcggtcaagatcgcggacttcgcgggttactgcgcgcacgatctcggtttgataggggggtagatgggcgagggattgggtgcgtttggcgtgttggacctatcgcgggtaaggtgttggtcagcggggtgcgttttcctcttttggtatttggtggtcggggttggggttggggttgtgagcgcccaagagcggaatagatctatagcccacgtaccaatttgttgccgagttcgccgtacatggtggccacgcggtcggggtcctggtgagggacgcgactttggtccatttcggcgagtgccaagattggctcttagtcaggtggagtgatcggcgccaaggttaaccttggaagtatagaggcacttgttgggtaaaggctcttgattcccgaaaaacatagaagagtacttggaaattaaagtgacacgtagaatactgcggaagggattgaatttgtacaagacggccagagaggagggaggcaaagaaaactggaaggagcacaaatggcttcagttctagacgaatcgggggaaagtgaccaatgagattattttcgaatccaaggaagcgggctaatgactgatattactatcagtactgcatagaagccctcatcttgttgtattcagcctgtgtgatgggctcatactttgcagcaccttctccgacacacggaatacattcaatcaccgagtcagaatccggtgacatgaaatacggaatagagaaccgcctacgggtcatacaatcagttcctttgaatctatcaggaagaggcggcaaagtgactcgatggctggtagacctcagaagatctatacaagtcagctttgagagcacaccaggagtatatcaggagacgaaccattgctccacctctgcaaaagatctcccacattcattacaatgacattcttaataggcgcggcagagataaatgttccgggtgaggaaacatcctcgacttccaacccaccacagtcatcctgaaacagcaaggtgatcgaactccagtcggtatgtgcggggcatctggctgcacgctctgtctcaattgcttcggctgggataggcggataatgcagtaggcgtagttggttattatgacctgagtgtttctcgagcagatggttctcatctagctccaagccaacagcaagcgcttgtaggacttcccctccgacacggaaacactcccagtagaagcggagcatgaagtcacggaatccggggagactgtattcgggcagccattgattaggctgggcggtattctcgtcactccctatgtcatagctttcctgtgccaggtcaatgaagctcaaaattatacatatatgaacttggcgccgacgggagatatgagatcatgtgcaagcacagcgggttctcactttgatgtctgtaacatccctcagctggtccactttgtccttgtcgttaccagtactcatagcctgtgacaccttctccagcccgggccaagagtaccctctgtgaaccgcccatccttctggatggggcgctttgagtttctcgtcttgtggtagttcgaagaatagccttgaccaactgaatgcttcgtctaacatcgattctggcaatgagtggttgacgatgtacacaaatcccacatttttgcaggcagccactatatcttgcgcgatttgctgacgattgggctccgtgttccagccagcaaagtccacgacagggatgttgggggacttggtagaagccatggcatatgcagattctagtgtaggaggcaatggacagcccatgggcggcaccgaggtctttttactcaacgggatttatttgactgcctagtagtttcggcgccttaccaatgttctgacgccgtgatacccgacggccttgttgagaactttcatttgccaatcacatgcaaccctaagcaaaaaaattcccgaggttgacggaaagtgtggaggctcagtggtgacatctagaaagccttataatctcatcgggatagcacgccaacatttacgccagttcctaacggtaaagtcatcagaagctattgtgttcatcactaaccgacaaggcatttgctatacttttagatatagtccacaattcgtgcaaaagccttcttccttcggtatctctcaaagaaccatcgacaaagatgtcaggagaaagtttcccgttgatgatgtttttcgatgtcttggggacaatcgtggaatggagatgttgcatcgcgaacgaactgaataccgcagcacaaagtgctctgcaagatcaggaccgaactctgagtgccgacgtgcgaacacgtgtctctgatatgtctacttcgagctggcaggagatcgctgaggagtggcatcgcgcatatatgaacttcggagacacctacgatacatctaagccctttgtctcagtggacgagtacaaccgcatttctttggaaaatatcctcaaccaaaggcttctccgcggcttgttcaacgaggacgatctcaacactttgacatttgcttggcatcgacttgactcacactctgacagtgtgtcgggcctttcgttgctgaacactaaattttcgacgtctacattatccaatggtaatgtaaagctccttgaagacctgcaagaacacaattctttgcctttcaagcatatcaccagtgcagagcatttcggtgcgtacaagccgtcgccagaggtctaccatggtgctgctcgcagattcggtttcaaggattcgcaatgttgtctcgtcgcagcccatcttgaggacttacaagccgctaaaaagtgtgggtttcagacaatctaccttgagagagaatctgaagaagcttgggatagtgaagacattgcacgagctagggaagaggggtttgtcgatctttgggtcggacttggaggctcaggtctgattgaagttgctcgacacttcggaatagaaggtgttgaatgaattatcacccagtcgggccctgaattagacgctggggtacccctaatgagggaaaactgatgtacatagctacgtaggtatctgtgaatttctttttctggttagttctgcctgtttgggtttggcgcctattgctcctcaatgaccttgccacacttgaatttcacctgggcaagattgaaaggttgcctctaacatcatcatgaataccacaccggagcagaccctcaacattgagtatgcactggtgtcggagggcaacccgcacgcctcaatggccgattacgagcgctgtgcgaggctacacaaccacctagttgcgtatggatggatggcccgcgacggacaagaaacactcaatctcgatgagttagctagtcagccatccattttcgcagacgaagatacgcaggctgttcgcgaatgactccacccgtcagtgaattccctcctggattcgatatcctcgcctgagccaggcttcttttactgggtaaaccatatttcaatgcaattggtcgacgacatctttccagacgaggaaaccgagaaaaacaacctggacgacctataacgatttgttgttatttacggcactgtggttgagttgggctcgcattgtgtcggcgtcgttcatggccaacagctgcacagcactgtttccccaatgacccttgaaaatctggatagcgtggagccgatcgatgagcctgaggatatgtggtttccactggaaaggatccttacaaactggatttatatgtttcgaatcggtaaaatcacagcggattcaccagagggggaaagcgcccgaagagctgtcatcgcaaatcgggctttggtcttggcttccatattctcctagccaggtcgatagtactgtggctgctatagatcgctactcggcagctatcgaagctagaatgctctccggatcacttttgcctatctctagagatgcgccgcttttcacagatgtagagctcgatgcggcatctgtaccggagtgctttattcggtcggttctgacgagaataaagactccccgtttcagagctattgcacccagcttggaggttccccacgatactgtggctttcacggctccgcagaggtttacatgggtgcctcacgaacaggaagaatggggcaagaatcgcccgtcccacttttcgcagctgtagatagcagccgcacagtcagctttgggaaggagattcgatggcttttccttgggccagaagatgacgtaccgttcaacgagaatgatcttatctctgcgggtctgtatagtgagtcagtacgccggtgcgaatatgatacgagaggctgatagaccggtggagagaatgagtagagaggggtatttggacggtcgggagagacagtgtggagggaacaattgataaattccatacagatagtgcgctcgttattggattgctccggactggtaatattcatggattcatggatgatttattgaaatactaagatgcccaaccagtcctggaagtacccaagtaacaataactgcagtaaatagttgggtgccaaatcgtgtgccacgtttggtttcacgggttgtcttttagtagttattgaaattattttaatacatattaccagtgctcccattaatagaaattaatatagaaaatttatatagccttgggcttcgggtctagagggtcgggctgtggttgctagggcatcccggtggagatttgtgacctgacctgggaactacatcatttgttctttaaaccctgatctcttctagaatctctagaatttcccttcagacagcaagtacccgggtgtattcaagtggcaagtcttcaattatacccctcgcgaccggtgaaaagctaatcttactcctttcagtagtttgttgacacccaaccccaaccccggataacgcctccaacgaacgaaacgaagaacgagaataaacgattgaactcacacaaaccaacgaaaacctcgagtccactccccaaaccgaccattccaaccccgccccagaaccccgagaatgcgagcttcccggtggatttggattgccgccacattcctcacctcgaccgtccactcaacagagacagcacccttcaccccagcagaagaagccacagccaacaaacgagccttcgaagtcctccgcatcctccgacgagccgaagataactgcccggctggcttcaccccctgcagcgaacttggcaacgccaacgcatgctgtaagcacggaacgaactgctcgcgcgatgacgccaacaacatcgcctgctgcgcaagcggcgcaagctgcaccggcagcctaacaggaacgaagacgacgggcacaggcaccatgttcatgttccccagcggcgcaaccgcaaccaccacggagagcgggacggcggccattactgggtcgagactggacggcgcatacccattcgtcgttgtcccgaccacttttagaaatgctgagacttgctcgtcttactactccgtttgtcagtctgagtacgcacagtgcactggcgcgctgatgggccgctacggcgttacgattggcggtgctggggagggcaagacggtccaggctgttacggcggcgtcgcaggcgacttccatctgctcgagcttgagtgtggaggcttgccatggtattaacttggggtattgtagctctgttgcgacacagactggtgatgcggacgcgaatgggaatgacgcctctcctgtacggatgtcgagtctgcacgatctggcattcgggctagcggttggggttgcgggaatgtttatatgatttacggatttgagatgacactttggatgcgttattttgcttgtatattccttctttttcctgtgattttctatcgccatgtggagtcatcagagacccctagaatctatggtatattattgagtctgggtgacgtctctgcgaaatctctcaatatgtacgctataagaaagccatatatatcttaccaaatctgaccaaactagatcttgatttatcgccattcatcaaggagctatttgtattcgcattccattatgacaaagtatccctaatatagaacctaaagatgggaccatattttggatgcagttatgcatgcgatgccgcctgggctagcagaatttcttgtctctcgttgctaggcgttatgctcaaggtacagaaacagtggttgagatctgatcaggcattagtggatgcatttcacctgggcaatctagcctgattagaaatccactgcactgtagattgattagatgtaccctctgttagcacccgtggacccgtggacaatggctgtgggctggtatccgatatggatccaccatggcactcatagaaagtattcgtcgttaaaaaatatagtaccccactttatttcgaccaatccggggttcgtacgccggtcgtggagatctgataggcctgacccttaaatgcgtaggaccaattatatcccattaaaagagcccacatctgtataccctcaatatagatctggaaagggaaaaaaaataggtagcttctctttgattatgcgtgtcatctaatcttctctgtatattttcagttgaccatatggcccaaagggcgaaatatctatgcgtttagttcactataaccacctcgtgctttgcgcagaaaattaccgcctgaatgtctccagaaggcagtggttgtttgtcataaaggctgtgtaaatgagcattatacacggtttaataaactattttgcagaacaagcgccttctctttccactgtaagcatcgtatttggtgttgatggtgttgacttctatacgggtggtttacacccgggttggcttctgggtcattaaatcatactacaacacgttttaggggcttcgactggaaagttgagaataactaattgcccgacagtctcagtaatgcgatcaacgggaatccattccaggttggtgatggaacatagatcagcacttccagttcggggttgagattcttcatcttcgcgctctcagaacatcgcgagggtggcccagcttattgtgtccagtcggcatgccagctaggttatgtggtcggtttcagaatcccatccaatccacgcgcaggctgaggatccttcaaccaaggcttcggcagtatgctcagcaaaggtcaagggtgatgacacggtgggaagcaagatcgtggatagtccgaagctcgttttgaacatgacctaagttggcggtgcgaagagtctcaccattcatggatgacctagaatgcagctgtctggtgctaaggcactggattcggggatgatagcggacaggacctgcacctccgatggaacgaatacgttgatggtattaccgctagttttgagccatcgtaccatcaaccatatggacaataagtggttccgcggcatacacaactatgagctggatatcaagtaaaagaatccaagtggcatgctagactgagaatttcctagacaagcattacaggatcgcccaaatagaggtactttcctattgaaatgactcgcctgtggaagctttgatcaccgagctagtgaacatgcgaaaaccgcctttgatctctttcaaggtaaatagattcaccagcatacgatgtagagacattttaggggatgtcccttggaaagctgtgagtatctataggcaatatatccctccagcaactctccgggagtctaactgcaggttcgatcggatctccaggggtttcaaaggattggacaattcatcattgggcggccattggtggcacggaatatccccgaccatgaaacccgcgacagccatgctttgctgcaattcaagggactcatggctgcccaacatatacacaattggattgtgttccttttccgattcatacatctgagtcatgacaattctgaaatagcggtgttggacataatgctgattgctgccatgcgggtggagacacctgcattcaacccgttgatcgctccgacaggacgcagggaagagggcaactcagggcttgtttttcgaggtaaaaagtatcgctagactaatcagaatcaagtaaaatttatttaatatgaaacccagccaccatgaaaataaaaagaaagtcttgggtggattaggcgaaaggtaggaaatcgggtggttgggtatacggagagaggctgggagatgctgtgtagctaacaaactggaacactctcctctcttgtcttctctcattcttctttattccttgtctacattccgataatctcttgacgtctcaggaatttgagatctttgtttaccggtgatctacaagatctctcgagtatacaagtgagacaagattactgagaaacgcccctccagtccaaatctcaggctttccgacacaagtgttttcgccgcgaaatcctggcattcgttgcctcgctcttcatttgcgatgcggtctttatccgtcctgccggtgctctcgacacttgccctacttctcaactactcgacccacgcagccgcaaccccgctcgcatttgaagcaaacgtcctcgaagaaaacaggcttgaaaagcgctgcgcaaatccatgtggctacaacgattggctttgctgcgagaccggtcagacgtgtactaccaacagtgcccaagaggccgtctgtgcagatggcggtggtagtggcagcggtggagactatcaatattacacaacgacctacgttctcaccaataccgacctaacgactattacctctgtgtggagcagccagatcgcagcacctacaagcacgggcacgtgcagagttgacctcggcgagacaaagtgcggctggaactgctgcgaggctgcgcaagaatgtgtagaaggccaatgtgttgctgagagctcttcggttgtcgtgactgctacagaaacgggatcaggatcagaagccacgccaggcgtgcgagggacgagcaatggggcaagcaccgtaacagcaacctcggccccaaccaccacagaaggattcacggcgccggttggaacggacggggcagctttgatcggggctaaagcctcaagcagcggtggactgagtggtggcgccatcgcaggaattgtcatcggcagtatcgttggtgcgttcttgctgttgctcctctgcgcctgcgtctgctttaagggcgtcttggaaggcctacttgcagcactcggcatcggcaagaagcgccgcaaacaggacacaacctatatcgaagagcgccattctcaccattcgcatggcagtcggcctccccctcctcctggccggacgtggttcggaagcaaaccagcgggaggcagtggggttagcgaaaagaaagaatccaaatggggctttggcacaattgccattatcctcggtgctcttgctctgtgcttgggattgaaaaggaagagagatagagagcacgatgacgacaagaccgagtcctcttacccaagttcatactactactattccgactattactcgggcacagggagtgcgtctacccccgtttaccaccatatacgaaaagactttactgacacttccttctttcacaggtagccgaagttctgacagacgcacgagagatacacgacggtcacgacgctcgcgcactcgctccgcccgcccgtgatagtgtctgatgcctcgggcttcagttcgacaacctcggtttgatatgcatttatggcgctggatttataacgtgactaatgtatgaatatgatttacacgatgatttttggttttgatttacgatattgcctttttttggtttcatgtcgatatgagagatttatggcacactattatgtacatatgagagattctgagtacaaactcgacatgagaatatgattcttgaacttgtcctgcggcacaagtattgaaatgatacatgtataactgctggtccccgggcaccggcatgaaagaaccatgagcaacctggaaattgcaatgcagagagcaaacagcttgcagaaaacaatgtgctctgtttggatgccttgcaggtttgacagcacaaagtatgcaaatgcaataagatccgagtcaaaataagataaaagactagaaaagacagaaaacaaaataattatagaataatatgtatactccatagttatggagtactccgtaggacagtaagacagtaagacagtaagacatgcccaaggccaaaaagaccacacaaaagttaaggcactttacctccccgccttcacttccgccttttccctcctccacactcctctattcgacctgacccattccacccattcaaccactctccttacggcttgtcttcaatcatcaatgatttcagcttcgggattaaactcctgacgttattaaccatatttcaactttatcccagcccccccattttgccgtcgcttcgcctgagttccgatccttcggagtattacgagtccccgaaacgactcatcacccaccatgcttcaagcgcagacccaacacgtcttctcccaccagcatcaatacccccaggctgatccttcgtggatgcagcatcagcaacagcaacaacaccaccaagctcagccgcacccgcaccagtcgcagcagcagcacgcttccctagtcgcccaacagcatgctcaggtgcaagctgctgctgccgcagcacagcaacaacactatggccgcattgccatgagcggcaacggtgctggaaaccctgcgcagggagccggtggcgccggcatgggtggagatggtatgtcaaatgcggtctccgccatggacggtgggatcagtgaggagaatcgcaaggtcttcatttgggtcgccgagctattggatccagctcgcagggaatcggccttgatggaactgagcaagaagcgggaacaggtccccgaactggctctggttatctggcactcctttggtatggctccgttcccgacatacgcccagtcccgtctacaataactaacggtcggaaacttgcaggtgtcatgactgcgctccttcaagaaattatctcggtatatccgctcttgaacccttctcagctgactgctgccgcatcaaaccgagtctgcaatgcgctggcgcttttgcaatgcgtcgcttctcacaacgagacccgtactctcttcttgaacggtgagcaatatatctaccacgacctatacaaaatcgattgctaatttttccctcgttcagcgcacatccctcttttcctctaccccttcctcaacaccacctccaagtctcgtcctttcgaatacctccgactaacatcgctgggcgtcatcggcgcattggtgaagaatgactcttctgacgtgatcaacttcctcctgactacggagatcattccgctctgccttcgcattatggagaccggatcagagctgagcaaaactgttgctatctttatcgtacagaagattcttcttgatgatattggcttgggctacatttgcgcgacatatgaaagattctatgccgtgggcactgtcctgagcaacatggtcactcagttagtggaacagcagactgtccgccttctcaagcacgttgttcgctgcttccttcggtgagtcctcttgcaatcttcctctgtgtatctgtgtgggccctcctaacagcagcatacagtctcagtgacaacagccgggcccgggaggccttgcggcaatgtctccccgaacctctccgggatgccaccttctcatccgtcctccgtgacgatgcagccactaagcgctgcttggctcaactccttatcaatttgtccgaccccgtcccggatggagccccgacagccatgtaacatactaaaagcatctgtttctttctcctgaaatatttcaccttatgatatgcatgggaaaggcttctggcgattaacggacacaaggcgcaaaattgtggttgaagaactggatggatccagcgcgtgaggtatgtcatcgattgaaggcatcggatccaaatctgtttttttcttcattcctggttgtttctttctttgccgcatttatatcgggtttcttgagggttcggtgatctgcgttgggggaggtttaatgtattcttgtccctttctgtttctacttcgttttttacttatcttcgttttgcattttgcttgtgggaaatatgcttcttctctttcgattgtcattgattttcatttttttcgacagaactattctgtcgcgtggcgcgaattctggttggcgctgtcgtctgtgtgcattttctcctcgtctttgacgaccccaacagctctgtgtgagatagacctttgaaagcgagagatatccaaagatccaggcgtctgctttgtttttggttttcttttttctatttttctgttttctcttgtgtatatgcgactgttctcaaaagcatgaatgtacttgtctcggattcatgaatattcggtcttccattgtctgcataatgtcattgtataactttcttctcatttaatgattaagatcaagaattaagattaatccaacattatatgatcgacaagataaaatgaatacattcccattctcacttttccccttgttaaattcgacaaacgcatctgctcacgtgacccagtccttgacgcgccgccttactgatcgtcttgcctcacgacacgaaaaaaagcccagactcagccttcatatttcttagaccttatctcatttttcgcactcgaattcttatttcggagttagatactatctggccttcatctccgccgaaatttctttttagtgaacccctcattgaacacctttgagaaaaccggccttaacggttgtcccgccgcgatgggatcgcgaaagcgcacccactccgaggtcgccccggtggccgagcaacaggtaccagaagagcctgggttgctttcacagctcaggagtaactgggcatttgcaagcctcatgcaatacatcgccatctttggccaggtcatgaagattgacgaagagtttgggattgaggtatgtcttgctagcattgtctgggataagatcaatgctgcgcttcgtgtcgcattgatgaaaggatataaattcgcattcacttgattgaattattgctgatatctttggccctatgttaggacctagaagtcgagtgcctcaaacccgagccctcccataaactactagagattggattgtgtcttctcaagtggatttcgtcgcatcgcggtcttacgtacgtatactgcaatccctttcttgctacccgaggcggttccactgacgctactgcgttggcagattcgacaatttcgatgagtacacccgacgccagtataatgcgaaagcacccaataaaaccaatcccttcggctacgatgaagaacccaacaagttcttgtatttcgatgttttcaccaagatccgtgtcctccaccagctgacggtatggacattctggaacgcggaccgcattcgcgacaagatgcccgaaaagaaggaaaccgagcagacagaatgggtaagttagctcttgtgtagctttttggctcctgattgtcgcatactgaccttccttagcgtattgaagagtttggctgggaccgcgaggggcgttcatactacgtgcttgacgacaaccgtctttaccgtcgcactgatccccctccacctccccctcctcagcgtcccaagaagaagccaaagagccggtcgtctcgagcatcaagaacgtcaaaacgtacctctacagcagcggcggaagagggttccgacgaggagagcaaggataccaacgatgcaagtgccgtcgcagcctttgccgaagatcctttcaagtgggagtgtgtggctgtcacactcgaggaataccaggctttcttggaaacactccaaaaaaccaaggacgcggacgagaaatacctacgcgatagcattgttgagcatgtcctgcccatcctcgagaaggcggaggaagcgcagcagcgcaagcgtcagaagcgtgaaaaggagcttctgaatctgcagcttgtcgcaggcgccaagaggtccagtcgacttgccgccaaggaagaaaaagaacgacaggagcgagaagctgctgaagccgcccaaaagcgcgaacacgacctggccgaggcgcgtaaggagcaggcgaggcaacataagcttgaagaagatcggcagtcgcgtacaatgactcgcgagcagcgcatcagagaccgtgaacaaaagcgactgctacatgaggcggagctggaaaggatcgcggaagaacaagaaagaatcaacaggggtgaaagcagggtgtctgtccgaaacctccaggctgacctggagaagtcccagaagagcctggcagggcttacccaagatgaccagtggatctttgactgctctggctgtggagtgtatggcgagaacttggtgagtttcagtttccaagcacatggcagccttaattaatctaaccttttccctaggatgatggaagtcatagtgttgcctgcgaaaaatgcaatgtttggcagcatagcaagtgcctcggtatctcacaggaagcggccgaaaaggaagactttcactttgtctgccgagactgcaagcaaaaggaagaagatgccagcaagcccaaacttccacccctcaaattccgggtgagcgcctcagcatctccttcagcagctcttccagccagtaagaagcacaagttagaggatgacggagaccatgctccgccctcgcctgtgaagagatcccacctggctctatctaatattcaaaacgaatcctcaggagtacaacctactctacactcgtccactgttggtcatgacaacttttatcctcctccctcgccccagcgccgggtccatcacacagatcacacttcccttccatcttctagccctcctcgtccaccattttccccaccaaagggcatgaatggcttgctgcatgccagtacggagcagcacccgcggccatcctcgtctcagcactccttgccgcctatgcaaccagctcctcaccttcccccagttggatcgttcactgtgcggccctcctcctcccactctgcccaaagccctgtccaaaaccaaccatctatgtcacctacacagggcaaccctgatgttggccctattgcggggttcccgtctgttgttccaagccatgcaccctctccgtggagttcattcgaaaccccgcgtccgcagtcaggtcatgcagcaacaccgtcgatgtctaacaactacccgtctttctctgcctcaacgcccaatggcaaccactcttcgcctcctcagagttctcacggcatggctatgtcggggattagcccaactaagcagtcgcctcgtccgcttactggtagtggcatggcaggtgcaccagtcttgccgcccatccgcagactggagccgagcccgaagctcatgggccgtagctctccagatgctccgatcccaccgcctgtcaaatgcatgactcctgagcaagaggaacgccgacagagagagaatgcttcaatgctacaccaagcccaccacttccagggcaatgggcagcatctgatgtcgtcgccatcgctgaatcgcattcctcccttggcctctgggaccacatctcagtaccctgatcctgttccttcgcctcagcgcgaaggcaatggcgaaagccaatgaatcctttgcgcaactgtgtgaacagcatgtgtttcttttctttcttttcttgtcctttcaaataccctttcgatcggcccgttcctgagtccgcaaacatatatgatcaccattttgatacgtcccggaatcactatcaaaacctaccacctgtactgcagtgcattttgagcaggtgtgatctgtgctttcgcactgttatccgacgtctgttttagctcatgcagaacgttggatgagtggatcattgtgcgcaaatgacatctatccggagtcattttccctggagacgacatgtcatacgtcgaacctcaacatctgccaaatgaagcctttttggcatgacggatgcttgtgttcatttgttctttctttcctttttccaaaagttctgctattgcagacaaatcttgttttttgataacgagttttccttttgtcgttggtgccagggctctgtctcgtggggaaattccttcgattcttcttggagctgcttcagactgtggtgggctggcgttttgagctctttatttctttcctgttttacaatgcatcaagatggatggggactcgagcggcgttttcagatggtctggccctgggcaccattgttttggtgggcgagcacatgtgtattctaatagacaatgttatttgattttaatcttgatatacttgatggctgatgaagttgattgactagatgggaaatgttgggacaaggcagaggtatatattccaaatctatatatgcagcttcctgttcaagtagtagaacaacatatacaaagcaataaccacaatctttgtgtttctaacctattgcaagccattccaccatctatttcctttagaaagttgttgcatattcatcctaccatgtatctaggtagtcaacacaaaagtattatgcccagcccagatcgaaattgaccgatacgtcgatcgacatatacccctaggtacaaatacaacgcccaaacgcagacctgcccagctcaacagccaacagcatgcacctgctggcataccgagctgcatactacctataggtacctacatccctgtaggacacgaccgcggctcgcggcatttggaccctttctctctagcccctgtttctcaatcatattattccgtttctttaatagttgtctcatttcgtttataggcacaatagaacatcgggatccgctacggagtagaatagtaaattaatgtaaaaaggagaaacacaaggaaaaagaagcaaaacaaaacaaaaacaaaacgaaaaagcgtttacccgcccctttgtcgcaatgtcccactccgcaaggatagattaccgatgagcacggtcaaagctcacgatagtacggagtacgccgtcgtactctaagcatattgtacactaaaaaagcaagtaaacccgttgataaagtatagcaaaaagcatatcaagatcatctagcctactctgtcgggtctagcatgcggcgcagtcaacttacatactactttcgagcgattgagcgattgtcccaagcgctaactggaggcgatcgctgtagatcacgcactaacttgcgtagcgctagcggcatgctcatctctccccctatcacacagcaatttggagttcgggataggaatgactagttgatctgccgtcctgtcatgtgtcataattccactcttatggggcttggacagggatattggttcaattcactgaggctgcgtgggtgaaatccatggtagatgaaataagaggactttcaataaagggaggatgtgctcggtagaataggtttatacatcaatatcatccgcaaccttcgtaagatctgccatgtccgtaatcatgaggacaagctcatctccgtggaacgtgaaggggaacgtgaacgtggatataaaatgtaaatgtcatttccccacctgtttcccatggtttctctcccgaacttaagatccggtggactaactgcaaatggatatgaacgttggggtgtatccggcatagccaattgggaagatgtacaacatatgctccacactccatatacagtagaggcagagtagattatacggaacgtgaatccgaatcccgctctatcgtattaattagtatcggtgccgtaggcatccacacatgtatggcttatagttcgcctaactacctattagccgggagtcgagaccaacagggcacggacatcaattttggagggcgatgattagctattaaaataaagtccaatgaaccaatcagaaaatagtctatcacatactttcgggatctggggatttagattatacgttattccgtacggaggttcggagctcggagtagtactccatagttactccacatcggatactccgagactcctttcgtactcctgacatagctagaataagcttagcgcaatcttagtacggcacattgacaatattccttggttattaggctcacacggcagacgcgatcatgatccgagctttttcttttccccactcatgcacctcattcttgtcaaaaatgtaaaatgtgggaaatagagggtggagaccgggtgtttggcccggccactgatgctggctccctcctagaagtctggacttgcgggtgcatgacaaataactatatttactggccaagtgtgtttgtagttaaggatttggagaacactggtagatgttatagaaatatagacgtcatcactaacatgaaatgggaagggaaaataagaaaagcctcaagaaaaaccctaagaatggcaaatgcaagaggatcttggcttgagaagtatttggaattgtcacgtcgattttagtctcagacacgggtggccacaggcgactattagcccaagctagcttgaaaaagacaattgcattcgacttgatctcttttctttgatcaaagtacgtactccaccatatgcatagatcaggtacggagtacaacatacaatatctacttcccatacctacgatactataccaagcactggtcactgcttcaagacccccactccctgcatttttaatcgacagtcacccagctccatcttttgcccctcgatccaccagactaaaataggaaccacagcccgttctacaaattgaagatcgggctcccccacttccatttggatactaaccaatatgtttcgtgatgaggcagccattaatttctcttggcgcgtacagaacccctcgtatcccgtattcgatctatgtgtgtttctgagttggaaattagttcaactcctacctaaagtatacaagaaaccggatagagccgacatcccgcgtaatagtccacttgtagcgcaccaatacccgcagaggtggagcaataccacagttgcgctctgtagacaagacgccgttggatgggaagagtgactatcgcattcgtcccacgatcttccttctcgcccttcctaactcatgccatagacttctgattcgcctgagtcatctaattggactttaatgaactctaaagccccgacccgccgttatttggataaatggagtaactcctttccccgttctgttcatatatggacaacgtgcattgtaaagacaaattagggcttcggggggtccggagataaacgatggtccgtggatctctgaacaggtgaccgtaagccaagccgacaagggtccttgatagatgaagctaaggacttcctaggttagtacggcccggggtacggatgactagtccagaatagttctcgattagcgactcggatcacagtgcatccgacgatattgtggtcatgaagttgggtttattgatttggggtaattccgatgaaaagaagtgtagattgaccaggacgcacgcggtaatccaaatccagcaccttgatcatgaaaatgaaaaagaagagaacgttgaattcgagaaccgactctagtacctccgacaccttctcctcgtcttggggtttgccaatagaaaacacggtatcatcttgactgatcatggaaaatacaagccaatctcagccagtctatacaagctgactaatacgaaccaagcactcctcgcgtttcggtcactccgaagagagtcgggcgttaaagttgtgacacccaaatcacatatatcaactttccacatctgaggggttcgaggggaaagtctgtttcctaaatcgtcgatatgacgatcgacactcattgctctatgaaaagctagcgggcattggcaaaagaaaaaaaaagtaaaaagagaaaagagagaaaagagagaaaagagagaggggagaaacaaaccttggaagaatgtgtattcaacgtaaggataaacgtgataacatgacttccatacattaactacaacgggttaagtgcaacatcaccaaaaaatgccacaggaacagaaagaaaggaatctacaagcacgaacgccagctcatgaactgcactcacaaagctctgtcgtccgtgcgcattctggcagataaaccgtcaacgatctcagtcttgaaccaattggggggagggaatctacctattggttttgctggtggagaacaccgccatgtttttggctgaggcttgcaggttattgcagtcgaccctttctccgttttgggttacaagcgcatcagaccctggtatatatccacaaatcaaatctctagctgttcccaggttgcgcaggagacacctcgtggccgtggcggtctgggaatttagcacagatcagatctctatattacccacccatatgtcggtagtggcttatttgccgttccagggttatttatcgggtaccctcgaggcattctgtcaatattatgtcaatagggtttgataggatagagttaggctttatggggctcgatgtcggggacagatgaacttgaatctccatggcgatccgccgtttgcgcgtggcttgtgctttgggaacttcttttggttcgccaattatggtacgacttctccccgctcctctgtcccctcgtaatgtgcggcctgaccgtaagccgtggactacgactttgggtatcggcagtggcacttgcaattgagtcgtacgaacctctttgaacaggtaggcgttcgtggccatgatcgaaaacagctaggccggaaattggacacagacacgaagacagattgattcgtcgactaacctgttggggaaattcaagcagatcgcaagataacaacagtgataaccatactcggccggttcggcggtctcaaccggggcccctgcaagaggcgtacgactatgagggaccacgtacagggttcaggggcggaacatgggagcgtcggggtctcggggtatcggggatcatgttcaagtggcctctaataagaatgcgagtgacaaattggccttgttcagtcgctcccttcactcttcttttacactggtcctcattatcaaatgcaggtctccttccccatgatgttggccagtgccccgaccttctttctctttctctcattctgtcactacaaaaatagcatcaacaatgaacacgataggaataacctgaaacgaagatatctttagaaacactcgaaacacaggaacaggcgatcagggggtgaaagagaagggcaacacgaaacatcgccgtttgccagtgagacagtgtggagatctgtgcactttgaaatcccaaagcagtcgagtcagcagattgaactgcgaccatccgaacgtttagagttggagcttatcctcttccgtcgagccagccttctagaaggtcttcgaaggacatctgtggaggcttgagcggggtgatcctggctgtcaatcgggttcatacttcttagagaagggttcgtgaacgggtaaaaggttgcagtagtggctcagaggcccgagcccttcattgtgaataccgtcgattcgtcgaaacgggatttgggagttgggaatcccggctgccaggggccgttggctattggtacaggtaattccgccgtccgcggccgagacggcgggggaatatactattgatccctcatttttggtcccaggaattcggtatctgaggatctgcacctgcgtcaaagctagaagcctgatacgcagtatcaactatacgacttcagggaccgggcatcggtgaggtatttcgactatcgaatggggtttgtatacggagcactacaaactaagtttggtcagacttcccgatgccattctccccgagtcggcggagggagctttgttgccccctcaatgttatttctttgaacgccttgactatgcaaaacgtggaatacattttggcccataacatcacggcatatggaccagggcgaataagatgcttacaggattccttacagggccgtcttggagataaaaaaagtaaaaaaaaaaaaaaaaaaaaaaaaaaaaaaaagagagaaaagataagctcaaagcgcaggcttgtgtctactccccgggctctttgatcgaggggtaacccacacggccatgcagtgcatgtctcagccttccaacagttcgtagatcacacatggcatctgcacgctctccactattcgagtaattgattgacattctgcgtccctctagacggttttcgagcgcccgacaaggacagggtggagggccaaacaaagaaaaacatgcatggccaagacttcaacgcagcgagagccatgcaataacgtggctggttcctgcgttcaagatcccaacagcccacgagccagtgcgtgggaaatgatcccttccagaaaaatcacaggccttggttggtctctcaccgtacatcgtagacagccacatccaatcttttggaaacaatccttgtatccattgacctatcttggggtctggcgaggggcaccgtcaaagcaacgtccaccccaggcttgtatccgctagtcttgatctggaattaggtatgtccccgagtaagcgcgaaccgccatgcatgtatggagtaatgacgaggatcaacaatattactcaatattactcggggagatcctccagggatgttgagttcaatgagttcatgacttcctatggcgttggcatagatttgaccttcaacgatgaatctgggatgaactggtcaggccgaagtgcgaactggtaaggccgaattccgaagtccgaacatcgaaacattacaagttatagatcggcgtttccgtgcaaatcaaagtctaaaagtccaatctcctgtattacttgaaatgacacgagccggggagtatcgaaggaaacctgagaagtgcccaggtggtagaaatgagggcaagactggtcacgcccagaaaatactccagtgccaaggaccagttcagccattcctggcttgggccttcgccggatacataaccccggtggagcctagccaatcagcattcatgtggcgctttggacttgtcgcccgttttctggtcacgatatcgacttgaaccgtggaaccgatgtcaagttaccgtcgatcagtgagggtccacttactccactacagccgcgatagaacgtctccccccgaagctcagaccccgagactccttgacgtcgattaataatggcgctagagaggaaaaagggaaaacttgccccgaagtccccggatccgacattacgaaccaataatctaaatctaggctgttgcctttttttgtatagcaatccatggttgatgatctgagcaatctatctgaggaactcttgagggaaactagcccaatcgcccggtggttgaaccgtggaataagtctctctagtaaaaattgttcatgactcgaatcggtgtaataactagtggaggttactgggatagttatgattcatagtatattttgcagctttaattttactctgctaagttatctaaacgcctcaaattgagggtgttatacagtatcacgtataccgcgcttgacagcaatgaactacatgcttgtagtgcatcattttcccgtttctctccaagctaacatctttctggatacttgcatcatctatacgcctctctgtgattgctttttctgaatgtcaaagtgtcaagacgtatacggagtagaaaaaaataaaataaaataaaagcaaacattccaacgaccctgcatccaagctaagatcaaactatggatatttcctaaacctggcatctaagcccctcttaccccggtaccagatatctcttttccatttgctttttgaatctggcctattgcatccccgggtatcgggcgttggaaagttcctacaggtccatggtctgcacctccaatgtaatggctccatactggggcctatgtggactctcttgccggggttattcggtgcatcgtcaatcttccgaacctttctctttcgccctgtgctatttgtagttctccaaatctggcacaaagactagatgtttgagatattatccgtgaagggtgtaacagatatgccatattaatcatactattataggcgttgaatggagatccagtagaaaattagtgcatatcaagccaatagcagatccaactaggaccaaaaaggtaaacaatctgccgtgaacgcccccactggatttagagtagaaaggaaaagggaatgaaataaagaaatagaaatgaaaaataaaaataaaaataaaaataaaaataaaaagtatatagtataaataaaacaaatgctaaaataaaataactcgatttaattaaatctaaatactaaatattttaatttattaaatgtatataaaaaaaaaaaaacactaaccatcgaccaagagaaatagatccacgccatgcgtattgtattccaggccttcttcttgaatcagtttcagcctccggcagtttgcgtatcttctcgtctcccctctgctgtcaattctatttaatttcgagacccgcccatctttcaatcttcaatttcccaatcttcaagtctttggctttttgtctctcggattctttgaacatatcagcttgatattcacacttagttactttcatacttacatccacacacttcgtccaattggattgttgcagtgtttgtctcacctgccagcagattcatctgcagtcgtgtttgagacctctctttcaggggagctcaactgcaagacaaacccaccatctgggtaggacggcagagaatatctttattctacatctcttccacttctttcctctttctggaaattctctttctcttctttactctcgccggactagcttccttgcgattcaacctctatcaacatatcttttatcttgtctaccagggtctaaaagatcacaacaatgactttagtggcaagacctattcctcctacccctccccagtctacagatggacatcctttgcctgaagagccctaccaaggccctggggtgtaccgacctgtgggcatcgacatgcaggtgcctcgtcacagaatcaacagtggtcaagaaatggtgagttccttgtcttctggctgttacccgatagcaatgctaaccatcctagcactacggttctcctccgttctacaccacccccagtttttctcacaacatgccttctcaatcggtaagttcgactcccatgttgtcatttgtccgcgcgtaagactgacaaaattagattatgatgtctggtgcccaggttaccacgcctcctccagcgtctgatgaagatctcgtttcaatgggatcacctactgtgatgaccccttcgtcatcttggtcacagtcggggtccccgcgcactcgtcccaagaagacagccaaacagcgacgccggaataaccggagagaactctccgattcagatatcaagctcgatggcccaatcagtcaacttactgaatcttttcactctactcctatcaaagatatggacgcctgggtgtctcgatctgcttctgagcgacaggacgaggtccgcaagaagaatgggaagatctctcgacccatgaattccttcatgctgtatcggtctgcatacgcagagcgcaccaagagactagtgggtgcgaacaaccaccaaattgtctcaaagatcgcgggccagggctggaagctagaacccgcggaggttcgccaaaaatacgaagacctggcgaagcaagaacgtgacaaccatgctgcaacacacccagactacaagttctcgcccaacaaagccgcggccactcccagtcgacgtgaaagcggctctcctgccctcacgccaggacgcatcattgatgacgggggtttctctgacatggagagtgaccttgggtccactacgtatcacgggtctgcctacgcccactcacgatcccaaagctttgaagaggcctactacgacagtagccgggattcttcgccatttgggcctgactccatgatgacacccggatacgttcacccctcgtggcaaaacacaagccacccgagtggcctcccagtggtacagcccagctctctccacgcttccgaatcttacggagacatgcactaccgccccaccagcccaaaccagcaggatatgggatatggctcttccctcgctggactccctggtggttctcaccacgagttgctccagcctcagcttggtcacccatcgcaagatctccccatgcacgacatggatccccgccttctgagcaacggtggcgagtcttctggagttggcgccatggccggtccttcctacgccgctaatcctggctcatatcctacctggattgacgagactcagtccggcttttacgcagcctcatcagcaccgtccatgtctcccagcaccgtttcatacgctcatcctagcatgacccctgcctacctccccagcatgccgagcatcgagaaccgtgatccatcatgggagatgcctcgccatgaaaacatggctgaccctactggcgctgagttcgagttgtggtgctccgctgagcccaactccaacagctactaggcgctggcaggaagtcaaacatggctatcccaaaggcatttcatacgtctactgtgtcattgggaatctgggctgaccgacttcttgttgcagcactcctggctgaggatggagcaagagttggccacgccgatgggcttttcaaaacaaaaagctcagtggggtacggagtttgagcttgggttgtatgtggttcatgatctccttggtttggccttttgtcttttccttttcatgctgccatgccagtcaatctggtatttgtcttactttcatttgatttttcggttttgcctggaactcgattcgatgcttagggcttttagatttctgtcattttcacgctcaaggaattatggagggaatcgtgatttttccaatgcgcattgattttgcctactcaaatttccatacaaatttcccctatctccaaagccattgaacattagggtaaaaggtcgcgttgactgtcacttgtctcagctagatttgtctcagctagattggcacccacacggaccttctcggtaatcgcttctgtcctatgctggaaacggcagtgatatccctccctagagatgtctgatctcatggcttgcattatatatcgttctgtcttgttctatcacactctatcacaccgctacttgagagattcgcacgcggttgccatatcctagaatgccccgatggggcaacatcgccatgtttctttcccatatttttgtggcgtcgccaggattttcaagcttatctttctcattgaattaaaaattccagaaggctttaggtataagatccgaacggggtttgtccccttcgaatgaaaccaagtacaaaacactgttacatgtgcctggtgtctacaaaagatgtatggatttatgccctttgtgttgaagagtacatatagatgctgctaacaaagggtcctaaaccctgaaattcccgtttatcatcttgtctgtttctaactcaaggtgctcattgttaagctcgcccttcctagacaggaaatccatacggtgtgtattgccgaagccaatattgacctaacctaggtaggtcctctcaatgaagacccacagagcagagacaaatacgtctgccatgcccaacacaggcccaatgcttttctctggcacttgacacacttctcgtatacctctctcgtataccccgagccctaagtcaggcaatactccaccgccccgcctgcccaccgccttgaccccaaaggcctcgccgggcaaggcgaattgattctgttgatcaagagattgcatagggacacccttacgagattgtttcaataaaagccaaatcagtcgatacatactttctccaggaagataatcaaatcactaatctggagtccacgacaacaaaacaatttcacttccgcccgttcctccgcacccctcctacccctcaaccacattcaagctcccaaaacaacatccacagccaagatgtcgattcccaacgaagctctccaaaaggtgagtcttggactggataaattcacgcttttaagtcgtatactgcgagcagatggccaggggaagttgtgtgccaagtcaattcggtctcactcagcctcttgtctctctccggttcccgattgaggaagtcaattccaatgaaagtgtgcaattgctgatgcttttaacaattacagctcctccaggagattgagacccgtgcgatcgcctcgcagcagcagatcagtatcaccaaggctcatatgacggctaagcagcgcgatatccgcatgctacagcttacatcgaaggagttgtctgagttaccttccgagacgagggtttacgagggcgtcggaaagatgtgagcatttttatttttaatttttattttccttttcctgtcttttgtttcttatttattttcgtttctcgtctcctgttctcaattttgcgactccgaaacagagacagtcggggaaactttcattggctctatttttcgtgaaactgagactgacttattgccctgttccaggttcgtcaatgttcccgtcgacacagttaacaagcgtcttacgcgtgagagcggcgaggccaccactgagatctccaacctcgagaagaagctgcaatatcacgagacgacaaaccagaagagtcgggagaacctggagcagattctcaagtctggtgggagggcgtgaacaaattgttgaaataagaatatgagacgagagcaagacgtgaacgcgatgcgctcccatgtggcgggtatccttgattgtggtatcttcataccaaaggttcagcgattctcgcgaatgtgaatctcaatggaagggagcagacagtgctgattctgcttcgtcttttcctttcgggttgatctgggacaccgttggatggcttgaagacgccgtcatctcgaggctgacgagtggatacgatatactatgcccagtggagatacagggaaggtagaaatggttgcccttctatgtccggctggcctggtcacattctggcgactatacatacttgggtttaggctggtgacttagatacccaggagttattgtttgcaaaaatatctttcttggatgaatcaagcgagcaaatagccttcacaggtgccatgataacctctttacgtatacctccatcttctgcgattcctttgccaatacctaaatctggattcaagaattgattgactttaggccgtctggcgagagagagccatcgagagaagtatgtagccccggtgccaacatcccaagatttaatgttcattgtactagttgcgtctcgaaaagtgcattgtggggccgtggtagcttattgtgctgcagctgtcattgtcaacgatgcaagggtcctcaaatgcgaagcacggttaaatctacttcgctctcgcctttctagtatgcgacatacataaggtgtctatgcagccataatatttttatagcatctcaccaaaatgccaatttggtagggctgatatgccaagcgctgtctagtcgaaagcatacctgaagatctgcaactaccttccaagattgtaagggaacggaaaagagattaatcataaaatcatgcataattctaactatatcatatacaacatacatcgtacattgtagggctttcatgtgctaccatactaacgccatcggcgtcatcccactcagactacatcaacgcccatgttccccactgcgtatattaaaaatgacgtagttatatctgggcaacgcaacccatttcctggaatgagaaccaacggcgcataattcgtggaacaatgccatgtgatggacttgttcattgtggcaacttgcgatactggcagcaagtcacagaatggccgttgggtgggcgagcaagtgcccttgtcgctgttattgcaatgacagggttcccctgtctggaaatagagatggacagtgcgttgtacggagtacattttgacataaaatgtaccttttttgccactgtagctgtttcacagatagcttattataggtgtggcttgcattggggcgctatatgtgtaggttggatataaggctagaaaaagtccgagggttaccctgtagtaattttttgagccatggtacttataaggttaggtcaggaagcttcaagttagatcatcaaagtaaagtataggtagaagatgcagcgaggagcgcagttttcgatggtcttcactggcatggaaaagtttttggggtacagtttctcactcggtggaagtatataaccactagcgatgcttcatttagccgcgttggattgcattcaaaagatgatgtagccaggtattgtagacccacgcagagctgtgtacaacatacatggatatcggtcttcgagaacctagacacatgaagtcaaatatgaatgttcataggcgtgacgtagaaactaggaagaagaaagtcgggtgcagaagtcaggtgtccatgggtcatttcatgggaacagccgagctcatccacaggtccctcgttgcattccgtggatggtatcacgttcttagatgcatgtatgtatgaacgacctcactccagattcaaacctacgtggaaacacggcctaacctgtgcgagcagtccagacggcagatctttcaggcactcaggtcagtcgaatatgacaattcctagatcatggataagctaaaacacccataggcttcttagttacaacacgtgatgctggcggacaaagtccggactgaaatatgctaacttgcgcaggtgcccctccccaagggcggcaactaagatccatggatagaaaagccccacccgggaaggtaccatgtatcgaaatggatatagatcaggatagacaaacatgaaacaccattggtgcccaatctacatcgcaacgaatagtatttcgaactcctagtttccaagattaggtagaaaaaccagcgcctcaataaacccaaactcgagtccaactccaagttcaagacgcgagcgacaagatcatccaacagaaaaggagtcgatcgtacaatatagtttcagtaaccgccgtttgtcttttaaattcgttctcagcgtctcacggaaagttagcgcgaagggtccgatcgtggctattttaagtggcgtatacgaaagatattgtttcatgtttggggggtttatgcagcggacatgtctgatgtggggtctagacgaattaatattagagtggctagttgttaagggcgttaacattaatctcgagattggactcgaagtgggggcctgatgacgatgctatgtatcccaaccttggaactcttgagttgaagttgaagagagagaggggggaagggtgcgtgggggtgtagaacgtagagaggaaagatggaagtatatcagcttgagtctcaacagaatgggtataggagtatgtatataagagtagaaaccattcccgagtcgaatccacggattatgcgccatgaggctgaactgcaggaattaaaaatgacgcccatacgcccatgatgcccagctgaataaataaaaaggtaatccaggccctcgtttttctctttctctttctccccccagcccctcccccgctttggctgataagcgcacacttctcctatacaaattcgggactgttttttttggcccccatctttttttgttcttcagcttgcttctcatttctttcgctttctcctggtgctcatatatagcctatcatctgccacctgcacctgataaccccgctcaggcccctatctatcagggtccccatacctgcgtactcttcgcatactcttcgcaaccccgccaaaatgcccgtacaagcaatgtttgacgacgatgactactcctcgaatgactcggagttcgagaccgacatcaccacccggcgaacaggtcttcaaacccatatccgcgagcgctcacactctcgtcaccgccgcccggaagtcatctctcgcgagtacctggcaccaatccaaacccgcgtgcaacggtcggcctcgacaagcggccgacgtcgcgaacgcgatccaccagtggcaccatcaccaccggtaatgattttcaatgagcaaagggtgaagtcaaacagccgctcggagaacaggccccagtctcgacatgtgcagcagcggttcatcgacgaccatcacagccacaacaaccaccaccaccaccgccacgaccgctttgatgacgatgatgacgatgtcttggatgtgccggggccacggcgccgccgacgcgccgtcagcagcctctcgcgggatgcatcccccttccaccgtgaccccgagctggccatgcgccagcacatgctggaccaaaatgacctccggcaggacatgagcaaccaactgctgaagcatgacaatcaccggcatgacagagagctcttgaagcatcagatggagatcgaacgactgcagcgcgaggtgcagaagtctcgtaagcgcagcgaaaagcagcgcgagaacattattataaatcaggatcatcccgatccgcacgcgatgcacgagctcagagaggagatggcgtacgaggacgagctggcgcagaagctggctaagttggcccggttcgagcacaaggaacaatccgcggaggaggagcgcaaggccgaagagcgctatcagctcaagatgctcgctatggaaaagaaggctgctgctgaggaagaggaggttagacataaactacaggaggagaggctgaaggagcttgcgcgtgcgcaggatgagaaaggacagcgggagaagctcgtgcgggaggagaggtggaaggaacttgcaaggaggaaggaggaagaagaggagagggagaagcttgtccgagaggagaagtggaaagagcttgcccggcagaaggaagaagaggaggagcgtcagaagcttatccaggagattcgggatgaggatatgcgaaaagcgagggaggccgagcagaagaggatgaaggagctcgccatgaaggctgctgctgttgaggagtggaagctcgaacaggagcggatgaagcaaagacaggcggaggaggcgattaagaaggcgcaggagttccgtgaacaccttcgtagccttggctattccgacgaagagatcgatgctatcgtcaataagaaaaagaatgatgagaagaagaaagaggaggaagaaaaggagaagaaggagaaggaggagaaggagaaaaaggagaaggaggaaaaggagaaaaaggagaaggagaaagaagaaaccaagctcacctggattaaggtatgcagttaccctattttatattccctctaactatatataagggggcttaactgacattataccaggtccatcgcaagcacttgctgccagatactttgatcgcctatggtctaccttgggactgggacgaggtaagaatgataaccctacgtgtacatatgtatgcaatggaaactaacatgttcatagaacgacaccaactatatcatcatcaaaaagtggatagacgacgagttccaagaacaactgttcgcccacaccagacgcctacgcgagggcaaggtcatcgcttcgacctcccactcgatgaccgaactaaaagtcaacgaccgcaaaaaggacaagctgttcttggtccggaagaagagcccttcaggccgggtgcgcatctttggataagagtctgctattctgcgctgtcctgattatgttgctggttggacaggaaattcggattcaccgatatccatggctttctatttgaacctcgttattgctttgtttcttgagacccggtctgattggactatttcttgttgaaattctgctgagttgtgcagtgttgatatctgttccttttcgttttattttatttttatatcacagagtatgtggtagtacagtaacgcgatatgagctgacgaccttgtttttattttgattccatcttctctctcgttgtaccagcctgccctatgtccagtccaccgtctcccccagtttatagggctggcaaacatttggcgggcatatgtgcttggtatagctagattcggggatacccatagtataaatggaaaagttgagggttggaattatatgataggcaatatgtgcagatgcagtacaatatacatgtcaggtttcagccccgtataaaaactcccattgggccaatcccaatgcaggtatgcacgtcccagcacggacccagatgcgagctagaacgggcctgaactataatacagaaagtggaatgcgtatgatatgtggagagggatagccaagggggcaggtagaatgcgagcctaaagaccaatctgggaattcgtttcccaccgcttctcagcgcgcaggatgagctcctcatagacagtccatgccagcgcggagctaatggccttgcgagccatgcggataccaagtccaccaaagagactgcgcaagccatcctcgtggatcatcaagcgggtagcatgcaacatgttcccatacttggcaggcatcagctgtaaccgggtcttgacggcgtcaaaaggattggtgattgcagttgccataccagcggctgctccgccggagacaaagtttattgacgaggacgaaaccgcatttggtgtgtcgccattattagagggctgtgcggccatcaaggcgaaccgtcgcttcaattgctcgtagaacagaacgtagaggcccgcgtatggggcatcgcgagcggcggtagcgccaaatcctgcaaagagcccacgcaggccttcagtgcggacgatatcccggcctgcgcctactaagctgcgatatgcgtagtagtctgactcatagcggaccttgatcaccgtcacgggcatcatgacgaagcctgcagcaactcttgcgacggctcccgtggcaagattggctgtgttggagagtttggggaggaccgaggaggatctaacgctcgctaccggactggctagggccatcgggttggattgtgcaacggcttggcgcaaggcgttgagactggtgaagtatagtgctgacccgaagccggtgcggagggctgaagggagggtgccacgccataatccacggattgggttcggagaggatatgatcgccttcaaggttgggaggagggctgctccctgggattgttggactctagttttgaggagatccgcgggttggaggaggatggaggaggtaaggccagagcaaagaccggcagcaaagtggaagggtgtttttgaggctgaagcaatgagaagattatggttagcaagggaaggagaagtattggggtttgaacagagatcatactttttgaggtgctcgttttcacctgtggtaccgttaaggtgctattgtttgacattgctggccaactcggaccgcaaaggcgacggcagtgaatatatttagtttaaatatcaaagattcaatgctagatcgaggtccatgggcgtcgtgtatgcgtaacggtcaagaaggcgtcgagatccggatgcgtaaaaaaataaagaacaaaaaacaaaaccaaaaagtccacgaagacagacggtcacggccaaatatgggcaacagcttgcattccacagagtaaatgaggggaaatagaattgaacaagataacaagatagtaattttcaagtgttggatatgccgaggtcacgaaaagacgttgaaactagtgaagtcatcgggttatggctatcgataagccacaccgcttggagttaacatattgtacaatatgtacggagtatagagtagaagagtaaaagtctactattaatccaattaatagctcatattcatgtattccaaagttaactatgtatagtataatctatcgtatacctgccataccatccttcatgcggctcttggaccttgaggctgtacttctgtactatgtagatcatttgcagtactacttgcacaacgcatacgaatcttgtttcatatagtttcaaatgcagcatcactacggaatataaatagaatatagagagggttaagagagtaataaggagcaagtcagtcaacagagaacccgcatccggcatctcgcggagtgcgcacggaccagacagccccgtgggtaatcgacgtcatgtggttcgttgttgtcttttctttttcccttcggattgaccttttatatgttgtatgttgcagagagcttcactcacagctctctttttccgaccttggtatacagtataatgccttggtctttgcccttctttccgtatccgcccgcaaaggacggatactgggaacctgtcacttccaccttgaactggtgcgaagaggtgtgtacaagaagtgacgcgtacagagagaactacgctaatatccctttcccccaggactattatgctaccgagtatgccgcggagattgtcaatacactcacgaatttgctgttcatgtggcttggagtccaggggataagaagctgccgtcgcaatggacatgatcaaatcttcacggtcgccctcattggctacctagtagtcggaacagggagcttcctgtttcactcgaccctcaaatgcaagtgtccctccagggttatgttatacccctcccaaccccaagatctggtttaaaccgggggtatccaccaaacatgcctaaaacgagatatgagtgatcgcaagagcaatgctgaccggtgaatcctcgcaatagaccctatgcaactagtggacgaactctcaatgatctacactacctgccttatggcctatgcctcattctcgtactctcggtccaccatcgtacgagtctgtctcggaatttcgctcgcaggtctcgctgtatttatcaccctgtactaccactacctccaagacccagtcttccaccagaacgcctacgcactcctgaccaccgtcgtcgtcctgcgcagcatgcacactatggaagtgaccctccgacccaaatggcgccactcaacggaggaggaccgcctagcccgccagaagaagggactccccgttccgacgaaggagcaccagcactacgagaacgtgcgcgaccagaagaccctcaagaccatgtggttcatggtggcatatgggctgagcatgtttttgggaggtttcttcatctggagcctggataatgtgttctgctctgatatccgccggatgcgccgctctgttggtcttccatggggtatctttttggagggtcatggctggtggtatgcgttgaactctcactattactattgactgtttgctaattcattcttgcaggcatatcatgaccggcattggtgcatatttctatatcacatggggaatctggctccgccattgcctcaacaaccgacaagaagaataccacctgcgctgggcgcacttctggcagatccccgaagtgatccgcacctcgggcggaccatccgagaacggggtatcccgggccaagaagtcaacgtgaaacagccggacattttctctctcccagttggttctttactcgtacccgtcgttgatgggtggcgatataccacactcttgcaaatgtgacttctgacataacatgaaatggataccacgcttcttcttgtctgtcctttgccgcgagactcggagcagagcactgttttttattctctgtcgttgctcttgcacagcttccacgaacacgattcgtcctggcgacggatctttttgctttggatcatagatataggatacctctttttttcttcttcttcttttctttctacgtggggacacgcggggtcgttgctatagatgggaatcaggcttgtgaactactatgatcgttgattcggcatactcattcataatatctgaaagcaatagaaaaacattcagacgatgcagtcttggacattctatattcatgtgctagaattacccgccaaatcagagtatccatggttctatacttacgcccaacgctacgaacgaaggagccacgaaacccagacagctatacaaacgaaccgaaccagctacagcttcgactccccattctgcaccgccttcttcggccttcgcgccggcgcaggaacattcttcaaccactccgcatcaacagtaaccttctcaatcttcgacttctgactccagaccgcgcggaaactctcctcctccgcacgccagcgacggatctccggcgcaagccaagaaaccgccgcatcagcacactcattcacagcctcctgggcaaggagatgaccaaactcctccaggaagacatcacgcacccggcccgcagcaacaccaccactaccacccagaccggtacccgtgttggcgagcttatcggcgcgcatagcggggagacacatatccgacttgccggcgaagatgtacagcacgctggggcgcaggaacgggagctgggagaagatgcgggcaggctcgggccggtagaaggggtagctgtcttgatgggttgcgtctaggtctgggtgagtgacgcggttgacgggcttggtgctgttcgggatgttggtgtagtttggccgcgagaaggtgaacacttcttggtgcagtggggttcggagggttactgggggtcctgttgttttatctattttcgtcttggggtctagtgggtggatggctgttgggaggtcccgcagaccgtattcgacccagcgggatagcactcgtgggtcccaggcttggtagaagggactgcgacggaagccttctgcggcggcttggcgcgagggccagatatcgcgccggtgggttgatagttgggttgttttggcgatctcgcgcttgttcttttggaggctgagactgtctagttgggttgtttgacgctggatgactgggtctaggaggattagtgtgtggatgagtcgggggtgcattagacacagttgtgtgctaggtcgtgttagccagctgctggatgttcttggttgttgaatcttacagatgggcgcctcccatgctatgcccgatgccaacgataggccggggcatctcagcccgcttgacattgattaggtggaggagatctcgggggtggtcgaaccagctggctgtatttaagttagcatcgtagttacttatcatacacatcaatatcacatacgatcatttcctagggaatcttcattgatcacgctgctttggccttcttgcgccacgtcggccatccagatactgcgaatacgcatcccattttgcttagatcgagcgtagatttcctcccaaagtggttcatatagttcctgccaggaataatcagtacatcgctgattgtatgtctcgaaggccatatcgcaatgcgcgcggctccgaaagcggctccggcagctctggacctcggcaccttgcatcacataccttggggaagccattcgcgtgggctccaaggatagtaatatcgcctggttgtggattgtgattatccagtggaatatattgtttcacagccagatgtaagggctcttcttggtcgttggccgtggctccaggatactccctaatgtgctgcgtgggcacgatatgctcaacaatgcggaagggggacgacatggtgtgcaatgttgccccttctagggagaagagattatatttattccagttcagaattattataagatgtactccgtaaaagagaatgagtttagtaaaagtccgagagaccgcggttttgcgggggagatgagccgaggatcttttggggtttgaggcattcgcctcttgttcaactgccgatgactatcctttccataacagctcataggtgaatataaatattttatttccctattaaattgatatctgggtcttatagctgcaataattgatagttctggttggtttggatgcgatgtagcgtaatttagccggcatagatcgcatatccaaaagctataagctatacccagccctctgctagacggaggctacacactatcttttcataggagaatacacccctggagtttatttgattacaagtcaaagacaagagagacagcattgccgctaggactgttcctgacatgatattcccgaacaagcaaagatgctacattattctatatactactctgcactgagagcaagacaagcatcaacagctaggccaaccctgcgaggaacagttaatcaaaatccaatatatcaatcgaacatctgcaaggatagaaagtactcacctcccctctttcatcttaacgacgtcatcgataagatcccggtctaggttgggaaacatgttcgaaagtgtctcgacgacattattatgttcagcacgttgtatgcggcgcgcctccgcatcttcagcactggcctgacgtgcggcggcgtcctgggcgtccagtacgcgggttagattcttcttcgcggttcccctaccgtgggcggagcgggcgcgctcatcacctgagcggcggctgtcctcgctgcttgcacgaggaggctggtagacgttcggggtgagacggggtggagcaacaacgggttggggcgtcgggacaggctgggggtgttcttgagaagtgacaggacctgaatctggctcgtccgagaagatgcggccgatggtggagagaggtttttggatcgtgcgtagcagtcctgcgactggggcggaggtgtcgtcgtcactggattgggtagtttctttgcggcttggtccggcctggggctgagatgaagggggttggatggagggcttctcttcgaaggtttcggattcgcggttttgttctgcaatagcggacacggcagcttcgacattgcgttcaaagtcctcgtcgctgacggttagacttgtgcggtccagggtctcgatgaattggatcgctccagactaaaagaggtcagctttttgacatctagaacagtatggaagtcaaacctaccaacgatgagatgtaataccctgcttcaccgccaagtttatcctggttgcggaatcgaaggatgtattggatgttagagacaagatggtcagggtttgcatgcaaaaccacatagatcaggagggggataaaagaatcggcagatgtgtcggcctttttggaattctttaatagaccaaagatgactttgcagcagttcaaaatgcaaatgaccttatccctgggagcacggtagccattgatttttgataattctgtcaagcaaagtcagaaggtgggaaccttggaaaactccccaaatagtccatagtacataccttgctgtgccaaattcaagaaacggcgtccaccgccgctcacagtcgggatatccagatgcgtttcgttgacccagctgtaaatgcgaatcttctgtgccagaatatcgtctcgctcaatgtcctcctgatgctggccacgtcgccacggcccatggagcctttctaactccctccgccggctccgacttgcacttctgggtattgttggcggagctggaatggctggtgcaaaagtctgcgaatatagacgattcataacaagtttctccatgccttccttggcattatcgaattcactatccgatatgtctcgccagatctcacacatggccatcttatttgtgataaacgtcaggaaatcgctaatgatcttcacttgctcgtggaccatccattgcttcttgccaaactccatgaggaacgaccgcaaaaacttggcgacggggtcggcggtgcggtgacgcagctgttctaggaagcggtgaaaatcaaatggttgctcagattctggttccggcattggtgggaccgtcgaggtggacgctcgccggtttgataccggcgattcgggcttgtgaggacgttgggatacaggctgtttctccggtgatgtagcgaccggagaattcgcagactcggtggagggcgcatggtccaaactggatttgcgtggcgggaaataagttggaccgcctctaaattgctcagcaagctcgagccggggagacatgatcactttttgatcggtgctccgcgcggggtcctggaattgtcccataatactttgaatctccggctgggaggcattatcatccctagggccttcgacctgaccaccttgtttagagtccgggtcactatcactgggcacatctgggagctctttctcggggctgggggtccgggttgtatcgatgggtggcagtgttggcggagtggtcgtagagcttgcattcaggttgaggtagacatcgtctttctggggcggagggggcggaggagtgtttgcgctggatggcagattgggtgtcgtatttcccgagaccgatagtctttccatctgccccgcaagttgttgttgctcagcctgtgatggttgggtagctgtcggtgagtccatcgtggcgggatcggcgagagcagccacagcctgtggctctgtcgtgtcttgcgcactcatttggactgtttgattgctgtccggtttcgcaagatcgtcctgtgtttgagctaggagatcggttggagcagtcggcgtttcagtgtcttcatggatatgggagacgtctctcgtctcggggcccggagaggacggggattctgtggccgacataagctatattaatcatatgcgcccggagtaaaaggatagattcagggggtcatcaaggctccgagtatgctcatgcggctctctcatgttgatgtgcggatcatcattgaaccgaggtagtccgcttctggattcgggctatgtacgtcgatgcctatgtactctgtaggtggtttctctctttcgtttgaggagactgcacatatgcacatatggattaacagaacaaaatatcaatgaataaaacactatggattcgtaaatcaacaatagagatctatttactaccaacgtgtaattctaacaaatgttcagcctttgtacagtcatagttgcatggtgcccttcttctttcactgattccaaagtcaaactcactatatagaaatagtggtcccctaacaagaagttttctactatttcaacatcttacaatccgttgtgaatgcatctgctggtgatggactttatggatgcccaggtcacgggtccatgggtggatctacaaacatgactaatgcttttgcctcaggcaaaaagtatatcaaaaaagctaccaagctaaccatctccgaataaacaaccactcccacccttctccgccatgtgtgggattttcttttcgctgagctcatcaaagcccacagaatcaacacaggagacctgctctctgctccagaagcgaggaccagacagctacaaaacgcatacgacgcaaaaagatatcaacccacaggatggagtgtctccgtccctttcctattatctcaccttcacatccacagtgctttcattgaggggtgatcatgtgtacacacagccactcgtagaccccacaacccagtctgtgctctgttggaacggagaagcctggaagattgctggggagcgtgtccaaggcaatgatacagaacgtgtcttcaacttatttttacaggcagtggatagtgatcagaaaggttcagttggaaaaatggctgaagctattgcaagtctctctggaccatttgcctttgtcttctatgatgctgtcaactcaaggctcttctacagcagagattgtcttgggaggcgatctctcctcgaaggattcgatgaagatgggaatttgaagatttgcagcatctgcgacagtgcatcggtggattgcttcaaggaagtgagcaccgagggtgtttgtacgattgacttagctcgctatcaagatccttctttatcttccagagatctgtgccaaatcgagaccttgccatggagctctgctacttcaatgccagctgatcacattgtatgttcctcgtgtatttcttcggtggcagcaactgacaagggaccccagaggaaatcaattccacccatgaacacatcactaccaacagagcagcctcctgcattgacaacagactcagcattcgtcgagcagctcgagtcaaagctgcatcaatcacttgaattgagaatacagaacattcccgagcctccaggctacattgcaggcgagaccgccaaaacagccgttctcttctccggcggtttagactgcacacttcttgccagactctcccacaacattctccccctcgacgaaccaatcgacctcctcaatgtagcattcgaaaacccccgagtggcagcagccgcaaaagccaaccaacaaaaatcccccacctcaccacccctctccatatatgaaaactgcccagaccgaataaccgggcgggccgcgcacatcgaactccaagcaacctgtccaggccgaacatggcgcttcatcgccatcgacatcccctacacagaaaccctcgcacaccgtgaccaagtcaagcgcctaatgagaccccacaataccgaaatggacatgtccatcgcatgcgccttgtacttcgcatcccgcggccaaggcacagcccaaacaaacccttcagcccaactcccgaccccagacacgccatcacccacttacacgaccacctcgcgcgtcctcctctccggactgggcgccgacgagctcttcgccggctacggccgccatagcgtcgccttcaaccgtggcggattcaaagacctaatcgccgagatcgacctcgacgtcagtcggctcggctcacggaatctcggccgcgacgaccgcgtcctctcgcactggggccgcgagacgcgtttccccttcctagacgaggacttcgtggcttgggtgctgcgggctcctgtgtgggagaagtgcgggttcggacttccgcagatcgacactacggctggtattgattgtgagaagctggcgctgcggcttgttgctctgcggctggggttggtgagggtttcgcgtgagaagaagagggctattcagtttggcgcgaggacggctaagatggagacggggaggtcgagaggtacggatgctttgagctgacacaaactaaacttgtggttgatggatttctgctacatgattttgagtctttcgtgctttgcgcatgcgatgcgtatccccgtgcatcttcctacacatccatccatttactctttctttttctgatagattcctctttcttttcatttttctcctctactgtgactttctcccgcacccccagctatgatgacagaacatggaaacagatacttccgaaacctccacctcacccgacaatcctaccttcatttcaatacacacaacatccacaagcacacctatctactcaaatctccgacgccagaatcccaaacgccccatctctcctagtgtctcccaccctcttccttcatccatagagcaacagcagtccccggacggcgcgtagctcatgctgaaaggaagcgggcgaggcgcgttctaagggaggaatagagtgctgtttggattttgggtacagggaggggatttgggaggcgcgttaggttgtgagtgtggatggtatgagatgaaggatggttggagggatcggggtgtgtttatgaggcgttaaaaggcaagtctgagctgggttagattataaatttccactttcaccatgagggacacgcggatggatacggagtaatcggaaggagcttcgtactagggaggacaatggactacactttctctttacgaggtaagctactagatcccagtttacaagtagaatcaagatagagaacataattgaacaaaagcaaattccacattaagatagccacgagtcaatcccaaaagggagacgatcagaaccggcctaaaacattcgaaaaccaatgagcttgaaggcagagcagggaaacaaaagtaagaaacacagatcgaaaggaaaaaaagaaacattgaggaacatgtctcaaaacttttggagaatcagacgaaacgaagcaaatcgcgatctgatctcggtgagacgtcagggctaggctttacccatcacccgcgcctaccacaatacccagagggtcaaaaggaaaaacaaaaacataagactgaatgtccaatcgtcacaatcgtcagaatcaccaatgggccataagccaaagaccaatgtctcaaagttgagatggaaggaccaagttgggatgaaagccccaccattactggtaggtgttttgaatctggagctgagccttgagcttggcaatctccgcgtcgcgctcagcgataatcttctgaagatcctcgatgcgacgctccgaagtggcctggcgttccatcttcttggcacgcgacttacgcgccgcctcggtgttacgagcgcgtttcgcagcaacaggatctttgggatcgaattcaatgggcgacagattcttgcgcgctcgcgaattgacacctgatacgctggagtgcttgactgcaccggaggcgggaacaggcggcgataccatggatcgctttgcgcgaggagaggcaggagacatgggaattggcatagctgggttggtcttctctccactagggaagggagccgccgcattcaaagtagcgaggtcgaaggcgtttagtgcatcagacgactgatcaaagagggagggccaatcctcgtggccgacaatatccatgtcggcaaacatgggcgaggtgttctggctgaagttgccgggcgactcgaacgagggagtgctcaagtcggtaaaagtgccagaaggaggaacagacgcatccatcatcagatccttgggcgagatagtgccaggaagaccttcggagaagtcgttggccagcccgatatcgtcgaacgaaagagattccataccggcagagaagtcggcggaggggagaccgaacagatcaacctcgtgagctggcatcgcgttagcaacgtaatcgctaggagatggtgaagtgtatgataaattaccttccatgaagttgggagtggacatgacacgtctgtacgtttgcgtgttgtttttgtggttttgttgaccgttaaaaagcgggatgggtgggcggttggtgtttggagaattggaaggcacagaagccgtgttggaacggttgtgcgtaaacgtggggcgggaccaataagagggggaccgggcaagctgggtcactctggggtctgggacaggtgagccagagtactgctgctggagatgtcgttgcaactgcagactgaaggagtgtcgtcgaggattattctgcgccaggaatggctgaagtgcagaaggtctatgggttgaattcacgggcacacgcgagcggggctgcgggtgtggtgttgctgatggatagagcacaaagtcctcgagtgcactgttgttgttgttgctgttgttgttctgattggaagccaagggctgtggaggttggggtgagggaagccatggttgctggtggtaatccgtgttgaacgactttaagtcgatcggggtaaagttgttgggagaactcgagctacgcgacgcgatgctgaagttcagaggtccaaaaggaggctctgaagggggaagagaggagataggaggggtggttcttgaagaaataatgtctgtctcagttgagaaagactggctgttcaaagacggggagcttattgggcacccattttggcgatagtcaagttgagtatagttctggtctaatagcaatttggcggtttatgtataaaatataatgtatgttgatgtgtgtgtgtgtgtgtgtgaagaagaacagattataaggaagaaaaatcaggcagacgagaatggggggaactcaggcacttcttaaggactgtgtgccctggcggtgaccaatcgggactccggagccgcacggggcttagtcctgaaagtcacggggtgtgagtcacagtgtgatccatggtcctgattggttacatttgacaggcatccatcgagcccgcagtacattggatggtacccacatattcgcctgcatttacctacatagtccaagtatctttcaagtaccggtcccaacgatcctctccgcttcttttcaaattggccaataattgatcagatcttatccctccgggaatatccaggcatcctgcattttttattttttattttattttttattttccttatatcttttttttttgttcttttcttcttattcctaaaacctcttgtaccatatatacaacggtaccgagtcttctcgaggaaatcaattccatccaggaaccaagacaattccaatctgtcagcttcggggaggtacagtctttctccatgaggatgagggaaaagtgatccaccgatcatttcccaattgcgtccccgcggtgggctgagtccatggccaacatcctatgagagcctcgtattttcttagtcctgccgaagggcgtgaaattgactttttaacgtttgtccttttctggtctttcaggtgaagatatttaactgtgcaatgttattaaagagccatagatccgtggtaagccagtgtttctcatctatattacttggtttcagaaaggaaaaaaaaaaagtccctcgggatattgcaatatcgtttacggattactattcgtattcaaccttggaagttcttagactacgcggagtacggactacggaaccgtccgtcatccagacccaattaattgattttttttctttttccttttttttctttgtgggttttcataatcccgacgtatcttccaagggccgaggcttcgccgaaataggtgcccgctatgaggacaccttgcagacatgtgtgatggactagaaatgtcatcattgcctagctaaacagttaaacttcacaatcaatatagcatcatatcgcaaaacactaaggcaacataggtaaccgcgatatgagctcgcgtgagaggccagatatcacgggcaccgtgtagaccatacatctctgcctagtggaatggcggtttcctaaaatgaggctatttggcatggcaatcattcaagcaaaatgcaccccagactgccaacgcattgcgatgggtcgctagatcttcaactacgagtattgcttgcatatacatatgcaaactatatggaccccgattttccctaggtggggctttcctagaatacgtaggaatgaacatggcctgctatgactatgtacaatgtatgtagacttgtatagcgcggacgaatgtgatgttttcacctggcagggtgaaaggcagtctatctgaatactcctttcatgccgcccatacttcgcgactgcttctgcttaaccgccattcgatcagaagactttcccaccattgtcgtgcaagccaacatagcaagaaggcatcaagtacgggtcgagctccgaccaataccacccaaggccccatcccagcgctggatagggagcccattcttgatatcgccaagtgcgtgctgctcaataaacgaaggtctcaagcctggtacaacttctgccgaacttgataactacttatccgtcaatacaacctgcccaatagtgataaaagccggcaagcccgtacgctgcccggacaggacaagataacctcaatcgtaaggttgatatctgccgaacccaacgttgtctgaacagccgcttgggcagagcgcttggaagtcgatgcctccactaaagccagatatccggaatagaggatgatcttggttaggcatgtgtggagatcgtatatcgtcatcaaaggtgttcgtcatcgagtcagcccacgccgtgaagatgaagcccaggaatatagcaatggttattaggaagatggtcgtgattgagaagagcttatacagctacgcgagcccaaattggaacgtggaggaaacggttagtaatgctcggtatggttgtagcgacggtgttggcgtctaggcgtccgaggatagaatatcacatagcgcgatgatgatgatgaaccaaaaggtggtggcccttggatagttgggttaccttnnnnnnnnnnnnnnnnnnnnnnnnnnnnnnnnnnnnnnnnnnnnnnnnnnnnnnnnnnnnnnnnnnnnnnnnnnnnnnnnnnnnnnnnnnnnnnnnnnnngtggtggttgattttgctgttgctgttgctgcaggttgggtaacacgatgaacttttcgtgctcgnagaaaggacntacggcgtggttgtagtcaccatcgtagggaatgtcgagaataggcgtatgggaagagacgagtagaagagggagctcccaatatcatacaagacgcgaggggccaactccgagcatgtgccccgcggccaactggtagggattagtgccttgagcgcctcgtgcaaggattctcgcctgctcaccttgacaccgtccaagctattcaatagatcgagttgaagactacttataatacacacaataggcacatatgtaaagcaaaaactgagagattctattaagtattacctatcgcaaggtgtgccacctccactggcggaatataaaccacccgttcgggacaataacggtagacaacattagagggtcaatttgggttgcaggaagaaacaagtcaaaggactatatccaaaactcatgcaacaagcaaaatgagcacccatcctccccacagggtatcaaacacaaaagcaagaaacaaaaaaagaagaaaaacggcagagtggtatcaatctagtcggacgacacaccacgtaacacatagtcgcgtcccgaatagagttacaggggcgggacgcaggtcgtaaaggaatggaccgcagtccaaacggctgctggcgtcgttggcgccgatggtattattttagagaaatagagatcaagggaacaaaaagcgacagcgggtatctcattgtcgccatctcaggtccagacccaagaataggggagtcagggggtactgagaacaacgacagtggcgagggtaaagcaaaacaattagagcgaagtgtgatcaaattttcaccttccggactcgattagaccgtcagggatatcgcgggcgggcggtggataggacaagtcccaccaccgctcaaactccacgataggtctcccagtcgcacttcatgcggcagcctgaacaggggtggcgacggcaacgttgacgttcttggactcctcagtggactcggcggccttgggggcctcctcaacgacagctggggcctcagtggcggtctccttggcagggacggcgggagcctcctcagcggcgtcagccttggcctcggtctcagcggcagcaacctcctccttgtcgagcttgacagccttgctgggcttgcggaaaagaccaccgagcttcttggccttggtctccttggcctcgccatcggtgacctcgttgtcagagtcagccttcttctccttcttcatgccaaggttgccgaagaacgaggtgcggcgcttctccttgggggtggagacagcctcggcagcgggagtctcagcagcaggggtctccacagcgtcagcgggggcagtcacggcctcggcctcgatgggcttgacagcggcctcctcgacggggttctcgagctgaggagcggtgctggcgacgggagtctcctcggcagcgggggcggtagcctccttctcggacttctcctgggaggggctggcgaccttctggaagaagttgccgaagatagaagcacgcttggccttcttctcggccttcttctcatccttagcctcctccttggcggcttcggtagtctcagcaggggtctcagcagtgggctcggcagccttagtgggggcagcagcggtctcagcggtctcagccgcaacgggggcaggagcctcagcggaggactcagtagtaggctcagcggccttggtctcctcagcagcggatgtctcctccttcttgtcctccttcttctcctcgggcttcttctcctcgacgtccttcttgcctagaagggtaccgaagatgctggtacgcttgcgggactgagaacggctcttggcggcggccttctcctccttcttctcttccttgggctcctcctcagcggccttggtctcctcggcagcaggggtctcctccttcttgtcctccttcttctcctcagccttcttctcctcgggcttcttggcggcggcaacggcaacggcaggcttggtgagcttctcgagctcagccttgtaaccctcgctggaggtgatggtctccttctcggccttagcttcggtggcctgagcctcgatggcgacaacccagctgtcacgctcggcagcgctggaggcttggaaggtgtgcttctggccagcaaccttgaagaggaactcgctagtaccctccttggtcacgtcagagacatcggcctattgcacatgttagtgtttgctgcatcgcgatacagtcgtcgaaggacttacgaggttgaaaatgccagcgggggtggccttatcctcagcacgcttggtgaagaagagcagacccttgccggtttggctggcccaagccgcggtggggttggcaacagcggccttctcgttctggtggaagacggagagctgcttgctctcaacagcctcctcgttgaagtagaagaagcgcttggcaaaacggaagcccctgaaaaaagcaaagaataactgttagtctcttgtatcgcatttgtggtcacagtcgcagcttacttgacgagaccaggagccttgtatcctagaacgccctcagtagcgggcttcacctcttccttggcaggctcagcagcctcggtggtctcaacggcgggagtggcagtgggctcggcggcctcagtggtctccttgggagcttcagtggcagcctcggtggcagcaggagtctcgacaggggtctcagcagcagtctcggcagggacgaccgcgggggtctcctcaacagtcttctggacctcagacatgattaaaataataaaggtattaaagaagctgagcttcgtagaataaaaggcgtgttggggtatagggtatctcaaaaggaaaagcaaaagaaattagagcacaatagctcgggtatcacgatgggtattttgctttgtgggaggaagaaaggaagagaggagaggaaaagggaagaaaaaagagtcagagggttgttgatggcgtctgcccagaaaaggaaaggacctgcagggagcccagagctcagtggacccgtggacccacaaggagattaggtaatggcacttcaggggttaattgttttttttccatttttttcagtgtttttttcagttctatttttctttccccctattatttcatattattttctattattattacacttgtttcaactatccctcctgcttcattcaatatctgaacatgtcaaatattaatatgtaacctggaatatggtttgcaactaactttgtagtcctggtggaacataggtcaatctactcccgtcctaaggtccacgggataacacgaacttctttgtctagcatggcgctagacatgacctaactggatttagttcctaaacatcaggaaataggagaaagaaaactctgcaaatcttggcttttagctgtatgaaatcatcacaccatggccacccgagctgtgatcggccatgcagcttgaattaacggccccgttgagtccctaattaatccgtgcagttcggatcctgttaccgatttgacaatatatgtctttcagcaattcttttcgtttcatgtacattctattctatattgtataccaaaaaaaaaggttgccgtcatatcgtcatagcggggttatctcaggtatcaggtcatcagactatccaaaaaatttgaaagtgcaccaattcatacttcctggactcgtaaggagattctacggttgttcggtggaccgccacaccgttggcgctcattcatcgcactttcaactgtcccgttacacagttcagggggggtctgccatccaaattactcaaataatccattcattgtcaaatcaactaagcctttcgatggttcttttgtattactccgcatagtcgagaagttgatccaaacttgcaactctgcctcggaagggccatatcggtacaagaatatccctttggaggggcatccctgtactccaaccgcccccaccaccaggccgtcattttgcttccttcatgatgatcaacccagtacgttgtagatatgtcgtatggacttttgccgcattcattcgcatagctcaagcatggtattggctacagagtcatgcacctatcacctatctttacgttctgcagaatggttggccatcacgacttcctggtgctatctttacccggaccccatgacctgatatcaactctatgatggagtggcgtgcaaatcctcgtggacaaccaaccagcagtgacacaacccctccttcttggctctggctttgatgtacatccctatcggcgtatcaactctctctaccacgctgcgagaaggatcccatgatgtgttcgtctagccaatcccagcacatttacagagtgtcgcctctttaagtgatgtgtgcatcattccatacgacaattgtctcatcatacttccagtccaccggaagacggagtatacaatggagtagtccttcctgggtactgtattgcgaagaacatctttgaaactagaaacaagatccacaggcttgaagaataatgaccctaattaagccccttttctttcgccctttgcaatgtactccgctgcttttcttctagaattagtatcagtgatacataagatcaagagagtacggagtacgcggtccccaccggactatgcattctagtttcaagtcttggcgaatagggggctagccagccctacctacaaacccagaggtgaatcaaagcgttttatttgattcatttccacggttcatcgacaggatagtgtctctaggccctgagagcgggaagtaccttggtacgcagcgcgttttcccgatactatggcatagtcacccttttatatccctgggcgtacaaaagtacgtggtatgattctgatctacaactagcatcaggacaagcaccatgaggtcccaacgccgactgccagaatgtggccgaagcatttccagtaatgatagccacacggggtggaatccaccctatcataagccccctttttgcacccgttagggcctccagcgctacgaagggcaattcatgttccccaaccctgccgtgctcgccctttttttgcggtcgggagtcccaaggtctcaaccctgctcctaccgcatgctatgaatggttggaatttaccgaccatcgacgatcacatcattattccaagttggacttgtcgatctttccttctgtctggtttctgtgtggactgaattttgacaccatgcaagtgccatgcgtagcggacccaggcgcctacggattctttcccgctttttcgggtgcatgttgctccatctgactacgttgtacattatgtactgtacggagtacatgatgcagataactatacgttttgagcaggaaaaaaagaaactaacatgtagtgccacagcaacaggacgacagttagctccactttctttgctttcgagaacataacatatctcccgaacgcgttacggaggaaattaatcttgatactccgcgccaagcaccaagtcgacctgcggtgtacacaggggtcagatttcccatccatctaagctctccgatgtcccccgacaagtctagcgtccactagatcgaattaaaccatggcacactttgatgaggatgggcgtttgcttaatattagcctgatattaactgtgggtttttcacccgatttaatcttgtagaacactgaacagaggtatatttccgacggacagtatccgaatcaaattgtgattcaaacgcctcgggctttttgggtagtacgggaggtgagagccacaatacaaagttgtggaataggggaggatccacacaagctcgggtatggagtctggcttgattttgaggcgtagagtctcgaacaaggatgttgcaattattgatctatcaccgcggtccgtgtgttggttcaagattccattttcactctgacgcaagcacttaacccaaggaatggatgcatggtacctgtgtcctgtacgttgtacatgtaaaatgctatacgactccgcagggtcagggctgtagatgagtcatatcacatgccacctgtccatggatggatgggatttggtggtatcacgtgatctcgcttatttgccaatcatagcacgtcccagccccttggacttcgccaccgcctttaagattttgcataaatacccccttctcccccggctcttcctcttcttttttctttcttcttcatacttaccttgtttgggtgactgcgatcaacaaggcggctcaccacagactggtccctgcattgcacatcgtggcggaacagtctgttcaatggttctttacgggtcattgacaggcgtattctttggcactctccattcgtggaactctttcttttcatcaagttttgagccattggctcgaggttggagaaaagatttagcctgtatacaacgtagtagacaatgaagctctagtaagctgtagccattcaccttgacccctacattagttctcgtaacctcgtccctgtctccagggtctcgtccatgtaagtgagttaacgtcgagtcctgtctcatggacgctacctccagacgcgcatcagtggctgtgcgctgtccttaatgagaacatgttcacttccagttcattctacggtgcttcagtgctcagtgtcccctgctatcagtcgtcgatcgctgggttctcacttcccggctccgttttgttgacatgacgtctgactcaatcgcttcgccacatgtggcgacgaagcccaggctaactcgtaccagcagcataaaaccagccattgcatcctactaaagccaatctcacagcatatcgaatttcagtttaccatcattctcctgtgcaacctacttctctcaaacccactgcggcacccgcgaccgaaaacttcactctcaactaagatgcctgtccccaccgccgacctctttgacaagcaacacagcgacgccaactgcacgcaacctgccagctcagctacacacacctccgaccggacggacaacaacagctatttcgggaccgcgcctggcaactcagctagtgcgtcgcagaatgctgagggtggtcgcgctctgaccaaggaggaggctgatcgcctgtacgaggagcggatggaggaggaatatgcgaagagggatggcggtgcttaagtcgaggcgatgtacccgtttctgctcgtcgactccagtcgataggtctagtcggcgggagctggtgtctaccaaggacgatggccttgtttcctctttttcctttctaccacgatgtattatgtgtgaattatcccttcccaaaacaattgtgtcttgtatttgcaagctcctgaattcatgctgcgatcactgcacattggagcttcaaaagcactaggacatacgttatcttggcatggtgctcgaactcgtatgtaatagctgcgagtcctattcaaacaagcattggctgtcctgttgtttcgcatccttactatggtgttgcatatgtcaccggtatgaggtccatggatattgtcgtccggatataagccgggggggtagcacctccccggggccgaaaccttgactgacacaaaatagaactggtttcttcgacgccgccaatggtcaggtacattacacgactatgtgactgtttttctgtggtagagttagtgtggattttcagttcaataaagccgatgaaagaaccccgagatatatatatctgatagtgtttcgatatataacacgaaacctggccccaagcacatcacatattccgttaaactgagcttctatcccaaccaatctgcatctgtgataaccccggctgatttggaacctatccacacaagtcgcctgtaccttcgaccactgacaggggttggcgccgcggccatcttcgagatccgccgacgacaagacgtggcggactggctgtaagattataccccaagaacaacaactaccatgataatcccaggatagatactggcttatgaccatatatgctcagtgtcccattaggatatctaatagatgactttgtgactgtttgacgtggaaaggtggccgtggatacctgatactgacaaccaatgatgcttttgcaacctcgcttgttgtaccttaagtatagtgacagtaagcaaacaacaactgaaaacctgggtatgtacactgtgcaatctctcattgatgtacataaccatgaaagagaacttctttcttcatccttcatcaacaccccagtccttatggacatcctctacagcacacatctacacctctataccaaaaattgcctatccgtgtcagacctccaacgtaaccatgtgagtcaataaacgcagccgtccttgggaagttaggatctcggaaactgaactttacacagggacctaacagaagtggtgatgacatatggcaagaggcctggtctagatgtcaaattaatgcgcgcgatgaagcgctcacaggaaatcgtcatccatgatatatcacaggttgatttttatagcaatctcacatacaatgttcgccttagggcagcaacaactcagattgtgggcacccaagccccaacaccctgcaagagatgcgaaaacacaatttggccattcacagaatgtgtaagggtcccgaccatggctcgcggttgttgtggaaactgcctatggagcaaagatcccgtacaaatgtgtagcttcgtccatggtacgtactccaatgcgacgggtatcttatgacatataagctaacagccactacaagatactgccgtggctactcgccagcatgggagtcgcccaaaagtggttcttcaagggaaggtgaccaaactgaaacgagaagcaagacattttgatgagactttgaaaagcatccagtctgccatgaccaatttcctcaacgaagaacccactaaaacacaacaatttcaaatcaacggtggtttggtcactctgaaatctagcgttgatgacgtgcttgaagccatgaagggtgtatctttgaagcatgacgacaaggacggtgaggaagacaacgagaaggaggacgagacagaggatgaagaagaccacgagaaagacggcgaggaagatgacgaagaaggcgatgaggaagacgataatgaagaagacgaggcggaagacgaggagccatgagcaactatcacgacatgtcagtggcctgtgaagaggaagaagcggtccgagtcaaccagcagatctttggtcagggtatctagtgtagcgctggctgtataaggtaaaaaggaaagagaaggaagtgctgtctgggatgtgatgttagttccaatgcaacctacggtgcgcccacgaatgatattaaacacatcaagatcgccagaaatgcaggtggtgcagtgtagaatcggcttcccagctaaactgagctcttatatagtgtgcaggaaccctcttctccatttacatgagtggttctacttaggtaggcaggagaggcctttgtcatatacttagaatcttaataggtaaatatctaggtcgctaatctcaacaatggactcgaaccaaactacagccagaatatggggacctgtggaattgacgctgttagccggtcatgcccaggtaggtgattacatatgtaactaggtactacctacaccgtcccccgacattagatcgaccaatccatctcagagcacgggcatttaccccttgtaattgcccgattgatggtcgttgctaagccttccaaactttgccgaatataagacgtcagcgaagctctacctggttgaattgctgtggcggtgatcgccgctggaaaacaaagtatggttcaatcttgtgcaatatgatagcatttctgctcagtgtaagacctctaaccagagctttctctgtcactccgtggaataaacctcacataaggagctgttgacatgcaatgcatgcagggtatgcgtttgtctctgtgcagactgagcatttgcctggtttgtcatgtttgtcattctcggaggctatttatacagcctcctttccatagattcagacctctcttcatctccatctttcctctcctccgtagcctcaacaggagcaactgcgcccgaggcaaaagatgagtccaaagaatcccttagtccggaagagtcatgtcatgttttgatattcctgggttgggaaggcggtgagaggtgtccttttgcatcaaccgtacgagtactcggtggtgtcactttcattcaccaatcattttcaagtatcttcttatcggccttctgcagtgtctattcggatttgctacgtgcttcgcccggccgccttacatcgcgacgtttgacgtacgccccacccatccttagcccatcatggcttcgcgacgcgaaatcaacagcagtgaagattcagctgactctggagcgtcatccattgcacgagatgctagaattgctcatcttttcttggatgcaactgaacttggactggagacagactcggccattctccagcgatcgctcagcttgaaatccgtcatttcgatgacctcgtctttcagccgccgcttccaaagtgcgcgttttcaaccggacctgcaggagataaatcaaattggcagtggcctacaaggcgccatcttcgaggtggtagggaaatattacgttctcaaaaaagagaatccaggcaatgaagcacgatcctcaaatctccggcgcgagtataaaacccactgcgatgtttcggccgcattcgaacgctaccgaagcgcaactgacaacaaggtccacgttcctaaaccccataactttatcttcaaaacacaaaacgacgcgtactgggataaaatcttttcgaaaataccccaggcttaccgcacgcgtggggacgtcatcactatggaacggattcttccgttaccgaaggtcgtacggaaagcgcttatcacttatttttgtggtcgtgaacgggatcttagtatcactgacatcgaatcccttctcaataaccctagcaataagcactgcctcgcccgagtctatttgggcaagactaatggttctatcaatcaggataacccagccccgctcagaaatttccctctccacctcggtttcatgaaggaacttggcatcgatacccttccgcttgctaaggaaatgggcaaggcatatgcaaccttacactggggcgccgccacaaacggcgatgatgttgaattcgtgcttggcacattagcctcaggggaaccgagagctttggttgagtctccagactttcagcaccgcgccgttggactccatcttttggacttcggccaatgcgaggcggttgacttaactcaggactgtgatgtcgtttaccaagcgttcaaaggggctatggtaacgggtgataaccagctttttatcccacattcctcgactagcccggcattgttcgcagccttcaagaagggatatattgatgctggtagtgtcattctatcagctaagcagctcaacaacaagtttagcatggaagatttcatgcaggagtatgaggaatatgctgaggatctcgtgtattagcttactcaccgtgcattcgagggtacactcgaccacgaaaatggaccgatggttgaagtcttgcttgtggtcttatctcttgggatctttttctagaccctttcgctgctttctattagaggggaattaaattcatagctcaacttcctgggactgacttggaggagaaaatatgatctaccaaagacaaggaaaatagctgaccacaatctccaatgaattcaagcacccagagaatgatagcggcgacatagtctacatgtaacaagtatgagtggttagactcgtctcacctcgaaccgtgtgtaatcagtagatacacgcactggacttagcacgggtttgaggttaggtcttttatgttcgtggcgagcgtttacaggaacaatatgtactccgtacatacttaagaaacagaaaccaccagattgtttcgatattgcgtgttggtatatgtagactccgacacccttagcagccacataattttgtagcatgcgatgacatactcgttccccaactatgatcagttggggaaacctgttcccattcccccgtaggcaatcatgacagatcccctgctaccccagacctctgggatacagataaaccaaagacagagcaattataacaagctatgagtacatccgcccagtgcagttgtagccaagagtggtctcaaggaaatatagttgttgtctgctgtagaagacactttgctcagtcgtctcacgacatcacgtgtagaccgaaatcacgtggctggatccggccagcttgacagagccacccgagaacgagtcccaaggagagcccggaatatctgcaacaacagagccgaggatctgtgcctctcattcaatctatctgtctactgtcactctttagccttctcttttcccctgttttcttaccaagagacacggctcctggtagcctccttacaccatggctccgcgggacaccttcttccgctcggcggatatgagcttgacccagctctacattgccaacgagatcggaagagaagttgtcagtgctttaggtgaagtcggtcaggttcagttccgagatgtaagtggcttagttcgctttgctttgatactccccgctgacctctttctagctcaacccggacacgaacgctttccaaagaacctttacaaaggaaatccgtcgcctcgacaatgtggaaagacagctccgctatttccaccaacagatggaaaaggccgcaatccccatgagatcttcctcggatttctccgatacactggctgcccctttagcctcggaaatcgacgagttggctgatcgcagcgagagccttgaacagcggattatctctctgaacgatagctacgagactttgaagaagcgcgaagtcgaactcagtgaatggcgatgggtacttagagaggccggtggcttcttcgatcgggtaggtggcttcgagtataccgccgttgacagacgaggctaactgaataggcccatacacaaacagaagacattcgtcagtccttcgacaacgatgaagctcccttgctccgcgatgttgagcaccacgcccctcgtcaaaatggagacacccagggtcagcagagcttctcggaaatgaacattggattcgttgctggtgttatcccccgagaccgaattggagcgttcgagcgtatcctctggcgcaccctgcgtggaaacctttacatgaaccagtctgagatcccggagcccattatcgaccctgtgaccaacgaggaagtccacaagaatgtctttgtcatcttcgctcacggcaagaatatccttgcgaagattagaaagatctcggagtcactcaacgcatccttgtacggtgtcgatgagaacagtgagctgagaagagaccagattcacgaagtgaacacccgtctcggcgacgttggcaatgtgctccgtaacaccaagaacacccttgatgcggaactttcgcaaatcgctcgctcgctcgccgcatggatgatcattgtcaaaaaggagaaggccgtttacgataccttgaacaagttttcatatgatcaagcgcggaagacgctgatcgccgaggcgtggtgcccgacaaactctcttgctctgatcaagtcaaccctccaggatgtgaacgaccgtgcgggcctcactgttcctacaattgtcaaccagatccgcaccaacaagacccctcccacttttgtcaggacgaacaagtttactgaaggattccaaacgattgtgaatgcctacggtatccctaagtattcggaagtcaaccctggcctgtacacggtcgtcactttccccttcctgttcgcagtcatgtttggtgattgcggtcacggtgcactaatgaccatggcggcttctgctatgatcttctgggaaaagaagctggcgcggactaaactggatgaactgacatacatggcattctatggacgatacatcatgttgatgatgggtctgttctcgatctacaccggttttatctacaacgatattttctccaaatctttcaccatcttccctagtcagtggcaatggcccgacgacatcaagcccgagcaaatggtcgaggcgacattgaaagaaggctatcgctatccaattggtctggactggaactggcacgaggcggacaattctctcctcttttcgaacagtatgaagatgaagatgagtgtacttttgggatggtgccacatgacctatgccctttgcttgcagtatgtcaatggacggcacttcaagtccaaggttgatatttggggcaactttgttcctggattgctcttcttccagtcgatctttggttacctcgtcctcactatactctacaagtggtccgtgaactggcaggagaagggagtgaaccctcccggtctgctcaacatgctcatcttcatgttcctgagccctggtacggtggacgagccgctctaccctggccagagaccggtccaggttatcctgctcctcatcgctgtggcccaggtacctatcatgctcttcctcaagccgttctggcttcgctatgaacacaaccgtgctcgtgccttgggttaccgcggtctcggcgagaactcccgggtgagcgcacttgacgccgacggtgacatggacgggctcggtcgtgacagtatggccagcgagggagaaggcgttgccatgctttctcaggacatcgatgacgaagagcacgaggagttcgactttggcgacgtcatgatccaccaagtcatccacaccattgaattctgcctgaactgtatctctcacactgcctcttaccttcgtctgtgggctctgtcgcttgcccaccagcaactgtcgatcgttctctggaccatgacccttggtggtgcctttgatcaggagagccccgtgacccgcgttatcatgattgttgtcagcttttacctctggttcgtactgactatttgcattctgtgtgtgatggaaggtaccagtgccatgctgcactcacttcgtcttcactgggttgaggcgatgagcaagcatttcgttggtgagggtattcctttcttgcctttcagcttcaagaccctgttggaggaggaccccgtggactagtcctttcctttctttttctataacgcacgggatgtgtctccttttttttccttttttccttttttttgtattgtaaagggtctagaattatacattatctatattgtaccgatccggtccacctgttattgttccattgatgtagatccctacatatatccacaccgaactatcatttatagcgtagatatgcccctttaattacctacacgtagacaccaatggcattacctaaatctcacgatcttttcaagtgcgcatgactacgagtggggtatagggaattcattcttccgttgctgatcccgaggccgagtcgggcaaggaacagaccgggaggatctagatctttgaacagtcttcgattagattggacatatattcatattagtatgatcgtatagctaattggagagtatttattttttatcttcttaagatatcaaattcctacagcgatcaacaatagtaatgatactgtgataacaaactacagttaaacagacgggcgttcccggcaaggggataaccggacgaggggcgagggtccgggtcacgcggggcaaaatgacgaaaacgggactgaggtcaactccccatacttctacccggtttgatcccctcactgacgttgaactactttttactttgccttgtttcaatattgccacttctactacttaagctactctaaaaactcaattgctatacccctttcaatctttataccctagatcactccaaatacttcaaaatggcttcagcaccccccgtcggagcggagaacatcaacactgatatcgtcacactttcccgcttcttcacagaagaacagatcaagtaccctgaagcttccggtgatttcaccctcctctgccatgccctccaattctccttcaagtcaattgcctactacatccgtcgtgcttccttgatcaaccttaccggactggctggttcctcgaacatgactggtgatgaccagaagaagctggacgtgattggcaatgatatcttcatctctgcgatgcgtggctccggcaagtgccgcatcgttgtctcagaagaagaagaggaagtgatccgattcgacgagcaccccaatgctcgctacgccgtcgtctgcgaccccatcgacggttcctccaacctggacgctggtgtgtctgttggcaccatcttcggtatcttccagcttcccgatgaggtcctcggtcccaacaagaccgtcggtccagaggacctgctccaccctggtaccagcctggtggcgtccggcttcaccatgtacggtgcctcagcgcagctggtgatcacgatgcgcggcggcggtgtcaacggcttcacactcgagaactcgcttggcgagttcatcctcacccaccctaacatgaagatgcccgcaacgcgctccatctactccgtcaacgagggtaatagccagtactgggacgagtggtgcaacgcctacttccacagcctcaagtatcccgaaaatggtggcaagccttacagcgcccgttatattggtagcatggtcgctgatgcttaccgtactctgttgtacggcggtatcttcgcctacccggccgactcgaagagccccaagggcaagctgcgtattctgtacgagtgtgcgcccatggctatggtcttcgagaacgcaggcggccttgctgtcaactcacgcatggagcgcttgatggaggttgttcctgagaacatccacgataagagtggtgtcttccttggctccaagggtgaggtccagaaggtcattgatatgtacaacaagtacaagaaataagcgtctcgttgagacgttcattccttctttctggatgctggtttactccggcatattccctcttaacactatttattcatctacttgtttatacattttggattcccgacctcctcgttgcatgttttagcgctctacgatacttatacctgcacagtcgggataaaaaataaaagaaattattaaattacactgttctatagtgctaccaactgcgtatgctccatagcggatgcatagtccaccagaccggttgccagagagacttccgatttaatcggatttgacacctaagactcgcaccatctctgcatttattcccccgggtcgtgctgggtcgaagctcaaggtccaacgaaacagagcggagtttagcaattgcttgatgcagttttggcgatagcgtcaaaatttactaggatttcatgactcctcattcgagcggccgatggcgtgctccgactcagccctataatagccagcagcttccaagaaaatgataaagcaatctcaacgatttggtcggcggtgtcatatccccatacctcagaggccaatccagctgctacaggagatacatagccccatcctattcagccatgtcttctctacccatcgataaagccccgcgcaccgtggaagccgaggaaaaccccacgaaatcagagactctagccggatctgagcccgcacgccagaaatggtatgagtggtttgcgccgacggacacgcccgccgagcgacggctgatcctcaagctcgatggattaatcatcgtcttcgtcttcctggcgtactgggctaaggtcttggattcgtcggctacgagtacagcctatgtgtctggcatgaaggaagatctaaagctttatgggaatcaattgaactatctgcagacggtctacatgtatgtcaattcgatggcttgatgatggtgcccaaggaggggattgaggatcgaagctgacttggtatagggttggttttatcacgatgcagattcctttgactctgttggttcgttgtcactaaatccatatcatggagctactgatttgctgactaccttttatagatgactcgctgccccgtgaactatttcctgcctgccgccgatctgtgctggggcatcttcaccctggcgcagtacaaggccagcaatgtcacccagctctacgccctacgcttcttcgtcggtgccctcggtggcttcttctttcctgctgtgcaatggtatctgggtagttggtacaagcgttcggaactgtcccgccgaggcgcgatcttcttcattgcctctcaggttggcagcatgagctcggggtacattcaagcgggagcttatgccacacttgatggccggtatggcattgaagggtggagatggctgtacataatttgtgagtgtatcccgagtcccacaagagaaaaaagagacaaagtctaacgataccaggctttgcatgcacaatcccgatcgccttcctaggcctatgcgtcctccccagcacaccagacaaatgcaactcgcgcttcctcagcgccgacgaagtccggctcgcgcaagagcgcatggcatccgagaaccgcgaagcccgccaacccttcaccaagtcgaaggttcttcaaatcctgaaaggctggcggctgtgggttctagtagcgttcgcattctttttctcgcaggcagacggcgtatcctcaaacagcggcttgcctatctggcttaaggaggagggatactcggtcgagagcatcaacacaatcacgacagtgtcaccggcagtcaccatcattgcgtccgtgatctgtggagttctctctgatgtatacgatgtgaaggctaccttgattgctgcgactgctgtgctgaatatccttgcctgcattgtgctagctatctggaatgtccccgttggactgaagttctttgcgttcttcctgtctggcacggcggatggtattgcggctattatctatgcctgggcaaatgagatttgtgctcatagtgctgaggagcgtgctattgtcatcagtgcgatgaataccattggtaatacctttggggcttggattccgcttttgtgagtgttggtgcaacctgttgatgctgaactttatgctgacttttctcttacttagcgtttggaagactgttgatgctccgaggtaccttgttgggtataactggactattgcccttgatgtgtgtatgctagctatgctggcggttctgtatcagttttgggcccgcgaaaagagactgtcatatacatagatgggcattatgctgccaggtggtaaaccaattaactgagatattcaagttggattttagttagttataacctcaaggttcattgtcaaggtcatagatcccaaatgacctcggctgggccgttgaggtactgacgtaagcagaactcgcctatggtggaactagtcccaatatggactagctccggctgaaggtgattccgcgccgtcagagcttgaaaaaagtacaaatttctgttttcactcttttctcttccatcatcctacgctcatcttcagcatggttaatgcttccaatgcaaatggagactgaggtcgattggtctctggccttgagccataaactctcgatacaatgcgtttttcactaaccaatagccgccctacaggatctgcaacgatggtaagatcttgtccactccattttcccccgaccatccatgcacctcccaacatgatgatacctataaccaaacaaactagagtctttgaccccaaggggaatgaaacctatgttattgcacgtcaggctgatctcacctcattgctttggactatcacacaaaccttgagttggactgagctaactcgcctttccagaaatgatcgtacagacatatcatcgattgcagataccaccccacaacaagcgcagatggtgagttaccttttatatttcttcattctacctttaccccatatcatgatgaacgcgatgtgtatgaaaatacgctggaaattaccgtctcagaccttcgggtcggtgatgatacaaatggctatttctgatctttaccctatctcaacatttgcatgaaaactcttttcagaccacaagctaatgtttggaagaccgataggttactgcgctactggctcaaatggtaagcctaaagcaccttccctacgagaatctctgtccgaagatgaaacggcactgggctccgacggcgtttaaaaaatgtccggtcatgatggatgcgcctttttgcggcaggcctagaaaacctcgcccactgagacataccttatattcatcgactcgtgaggtggttgcgtgacacagtcactaaccctttcttgaatagaagcctatctgattgtgcccgattgagaccctgtaactgtagaaggtatgcgactgagttttgttgttctttttgccctacctactatgatgataccatttagatgacgagtctgattcgagttttcgatgctgacacaatctttttaataccattcatgcctttctgacattcattcctacacttttttttcactcatccaaatttccttggcaagtgctaatgattctttgaagacagatattatgaactttcaggaactctgttgactccaatgttgacttgtgacttgtgggtgtatgtacacctcgtctccttccctttccgaccttacatgatgaaacgacacaaaaaagacaagcatatgtccaagtcagcttgctggcgaagacgataaactgtcatgcctgatcaattcacgaatctcatgcattgctacaatgtccattcagtactcgatgctgattgagatcgaacagaaacaaattgagcgaactaataattgcagacgccaagggcgatctgtcttactgctttttgtaagttctgattattttttttttctctttccctcatcttcttttatgatgattcacttcaatttatcacgacggtcaacgtaaggaattttaattgacgaccatcgcctgtgacaaggctttatctgaaatttatcccgacacaatttgtttcttgccatcgcttgttagtctcgatactaatatcgatttcagacagtttcaatatgccggagccgtcggtcttccttcggtcactacacgtggcagagaatatcccggtcttgttatgaaagtccgcagtagttaaggagtttaatggcgaaataccaatcacaattcaaagaaacctctgatctttgctgtaaatgtgtagatgatctttttttggatcttccccatgtcccctgtaagagacccccctgcatactctgactttttacggcttttgttaagataaatcccgtcccatgactctctctggtttgttggtttgttgttttattgcggggacataggggacaagggtcgttgggcctctcatagagagcgataggcgccgagctggggcctcggatgtgatgagaatctcctgaggtgcataaacaatccccgctgcggcctggctcatttgttctcggaatccttctttcttctgttccaaatatagatttcctttatgggtccatctgcttctgctcgtacggagtactattccgtatgggctattgtttcccctcaaccttgccctctgttgcaaataatagaaaaatttagcgtctcgcctgtttcgagccaatagttttttctctgttctgttgggttatcctctttcattccaggcggccatggcttcggttcgggcctcctagatggatgcacagcccaatatgaataggtgcgacacatcttattctcgggcatttctttctatatactgatccctatctagctggttgagttcaaatcatgcagtcgagcagccgctgagcaaccattaccagggctggtcatcgactgcgagtcccagcaatcagccatcaccaggtcgccgagaacatgctgtacagccgccattgttgaccacagcactgagcggtcctcaataccagggtcttgggactggtcttggactaacaccgacgcctttatcatcaacctcgctttcgagcccatttactcacggtctatcgcctgctgttccatcgcctattaacggcagatcggtttcgtcgtcttcgatggcgtccagaaacgcatacaatgttccttataacccccaggactgggggccaccgggcaggccccaggcgcaagccccgtatcttcagccaggcacgatgcatcgtgtgacgccgcaaagaaataacccgggtgagtctcgctcacagtctatgcctctgcagactagtggtacccccaaggcccgctttggattgacattgatccttcggtagatgtgtcgttgtctccacctcctccgccatactcacctcccagtaaccaacaaaatcgaatgtcccaggacttctctggtcagacgaaccctaattttgccggaacgccttctccacccgacaacagggaaggcgggtttgacatgcctgcccagtatcaaagacgctcaaaccggccacgaccattatctatggcttacccatctgactcggggtctcgtcagccgctccctcctccacctcccccgcagggacatccatcgagtagatcagtttctcagggtccagcggagtaccagggcatgccctataatgatcaagctacgcaatataatgccacaggtagtcacaggcctcgggtggcacagtacgaccagggccaaccttcaactggctttaacgggcatatgtctgcagcaccagctcatttcgacacaccaacccgggccccggcatcccgaagagccgcatccgctggggctgtggtaagcagtgcgggctcttcaagggcaacgagtcagtcgcgaaatcgatcgccgtcaaatagtaactgggagcccgggatgccgcttccgccaccacctccaggaccccctcccgccgcaaggtccgtcagtgtgagtggctcgtcagaatcgtctctgagaacgacccagagctcgaacaggacgacgaggagggggcctcccgtactaggcacaggactgggaagcatcccgcctacgccagctgactggatagatgagggatatttgaacagtcggccaacggagaatttatatgttgacacggcaaaagcggccaaggcgccagagccgaacgatggagatcctcacgatccatcaaatcaaagaactcctggtagcggcggtcttttccgcagctcagctgtccgcgatccaagtgccaagggaatccgtgaaaggcgaattgaacgacgcaatcggcaaagccagattctcgaacccccaagtgcgatatcgtcaagtggtaatccttgggccgatgctctcgagcaaatcaaaccatcgaacctgatcctaccagatcagaccaatagcccagatcaagatcggcatccaacgtcgggcaagtacaaccaaacccctctcagtacccgcagcattaaatcagagggacaatataccggctcccggcctcgaacatcgtccagcgctctcctttcggagcaatcaccctacgggactccaagacagcaccccagctcggctggtccctcggctgtattcgcacatacgcctccattttcgcccaatccaaatggagtgggctcgtcggcataccccaaagaagccagccaaccagtaccaccaaaggcactaccaactccgcctctcaactcagcaaaggaggcccggccacgctcacgttcccgtgcacccggaggagcggaagaccgtccactctctcacatcctccacatgcccaacgatactgtgtcgatgatgaaacccttgtcgccacgccgaacgccgggacaacaaacggcgcaggtgtcaatggaatcgattcttcgacaagatcctgctttcctacaggatgcgattcaaagacacaagacctttattgataaagaagccagcgccgaggatgacgccgaagccctcaaaatctttgcggactatatgcttgccgaatctcagatccgacgccagcggtactcgaaggcctgggaatccttccaagtggaggatgtgcgtcgcaatctgttcgagttgccggtcaagcaaccaccaaagcctaagccccagccaaagctagatatcccgcaaaatcgagcagggcgaccggagtctgcgtggtggaataactatcagccttgtctgtccccaattgccagccttaacatgagcaacgaggagagctctcgaggccgtgcaccgagtcgctggtgggagtcggcaaccggttctagtggtgagggggccgagagaagggttcaacgatccaagcgggagtcgaagtacatgggattgcctagggaggccatgcatggggaccaggagttgactccttctcagcccaaagatgtgaggatgaactatggtaatacggaatatggctctgatgagtacccacctgagaaagtcggctggcatgaagggtctcctgcaaattccacgggaacaggatatcgctacgaaacccgcagtttagatatctcgcgcttgatcaccctgcctccgccttatccccgccaccatcctgctgtgaataacagccatcctgatttggtcactcatcgaactacggtccggtcaattactgatctcgcggagatcaaaaccaccagacatcggtataaggccgacgtggagcgaatgctccaagagcaccagcagcaagtcgacgagggccaccgccacttcaggtcgaacatccaaggccagattcaagagggcagtctcaccttcgcggaagcagcagaggccgaggcagcgatgattgccgaggagaacgagcgagaaagggcaatggtcaaacgccagctagacacgtaccaagaaacagtgctccagccgatgcacgccattctcgtcgacaggatcaacagagcaacaacctgcatcgaccagctgagcagcgagctctcggacgatgcccagagcgggacaccagatcaaacacaggaagaaggcgacgagaagcccgagctcctagagaaactgacacaactaaaatggctcttcgaagcccgcgaacagctccaccgcgagtcattcgacctaatcagcgaccgcgacgacaaatacaaagccgtcgccctgctcccgtacaagcaaaccaagaacgaagacaagctacgagagacgcaagcattcttcactcaggacgcactcgaccgacgcgtgcagtacgaaaacgaggcgctaacccggctcgagacgttcctggacgtcattgagcagaacgtcatgcgaggcgtcgaggtgcagctctctgcattctgggatatcgccccgtccctcctggctctcgtgcagcaggcgcctgaggacctgcgcggcttccaggtgcagatccccgctgatgaatacgaggaaaatccgagttaccatgagcatccgctgcagtatctgtatacgctgctgtcgcatgcggagaaatcgagctaccagttcatcgagtcgcagacgaatctgctttgtctcttgcatgaggtgcggtctgctgttatgcgggctaatcagaagcttgtggaggcgcagcgtattaagcgtggggagcctgaggaagatgtccggagggagatgcaggagactcgtgctgatgaagagttggcccttacgactgatcttaaggataaggttgctacggttgaggggcagtggactgaggcactggggagccagattgagggactgagggaacgggtgaaggaacagcttatgaatgaggatggctgggaggaattggaacaattggaggaatagaagagtggctttttggactttttttctatgtgcttgctagcgtgatatccccattcgttcgttatagatcgagtgatgcgaggcagtgcctgcgacacttgagtttttggtctccttttagggattgagggttgaatacacacacatttcaaccagcaaaagagtgtagattgtccattgcagtgaaatacaagggatatcgtagtgaagaagaagaatgacctcatgcccaggcgatatctgagaaatcgctagcgctatccacagtcacgtgcaccttctagagtcttccgtccgccttcaaatagctgtctttcccctcgactctcctttctttcatttctcctcagtccttgttcttgatgttctgaactcgatcgcaactgtaagttccaattgcctcttttgcttttactacattcccccttgagtgcaatgagagggtggtttcaacctgcccctcttgcactcaattggcctcacatgaagagacttcagctggcaccagtctgagagatgattctccatctacttgcggacaacgcttaacaagtccgggaattacgccccgagacctgacattggccttttccttcctgcaattttcatcctcgagaagaaagatcgtgactaacaggaatttccaacagaacttttagcaactttttttcttctccaaaagatttctttttttaaacaggaaacccactttccaacctcaaatcagagttttctttcatttcactagtcaacattcatcatggtccttcacaaccccaacaactggcactgggtcaacaaggatgcttctggctgggccaaggagtacttgcagaagaacctagtcgacctcagtgtcgaggaagggggcgtgtccgccaaagtaagcaagctattgtccatggatggcgacgtagatgtcagccagcgcaagggcaaggtcatcactctgttcgatgtcaaggtctcgctagaatactcaggtttgtagtccaatatcaattcagtttatttcaattgctcgttttttttgccttttctttttccttctttcttttgtcttttgtggacctggcagctgagacgcttccataggtaagaccaaggacgacgaggatgtcagcggctccatcaacattcccgaggtagcccacgacaccgaggaagatgagtacgtcgtatgttcacttgacccattccccttcgccaaggtgatctgtaatactaaccacgtaaaaaccccacctacagttcgagattgaaaaccacgccgactcaaactccaagcagcccgtaaaggaactggtgcgcacaaagctcgttgccgaactccgcaaggccctgtccggcctcacccctgccctgatctccgagcacggcaaggacctccagcacgccccgggcgtcaacccatccagcggcttccccaaggcccccgtccacccgcaaaccaagtccgatacctcggccgcgcaggccaccaccacctcgaagaccggtaaggtcgccgttaacacaaccaccgtgactgcctcggacgagttccgcaccacagccggcgagctctacaacaccttcacggacccgcagcgcatcacggcattcacgcgcggcgcgccgcgccagttcgagggcgccaaggtcggcggcaagttcgctatcttcgacggaaacgtgactggcgagttcgtcaccctcgatgagcccaagcagattgttcagaaatggcgtcttgcccagtggcccgagggtcacttcagtacgcaggagatcaacttcgatcagaatgatatcgacggtgttacccagatgcgcgtttcttggtctggtgttccggttggccaggaggatgtcaccaagcagaactgggacatgtactatgtccgcagcattaagcagactttcgggtatgtcgtttctcctttccctcccttttcttcacttgttcttttctacatacacctttcctctctcctggactattttgccaatctggcttctgtctacagatctcagcgttccacaaagacctcgcagtactggaatcagttactaatcatcctcgttcttctcttcggtgtaggtttggcagtattctctgatcgactacgtctcttaccggtggcatgaaagacacaaacaatgcattcgtccgaagacttctttcctctttttctccatgaattggccaccgataaagattgcaaaaagcgcaagcaactagattatactgctttcttttccaatttcatgtctcttttcttttttccgtgtcccgcttgcagttgtgttgggttggggcacaatgatgctatgataagaggagtggtgttatgtctacgataatgaaagataagttatgttttgatctacttgggctcttttgatagatggtatgacggttactcttctcttgtcgggctatgccctcatggtagcctcaggccgttgagcactggaggttcttggatggccgactctgggattgagtcctgctattgatgggtctcttcatgaagaacgctccgagaacatctttccacgaaccctgataccgagatagacggagcccggcgttctgccttccaaagaagtccgccaagagagcgaaggcattctccgtctcacttcttgacacatctttccttgaacagtgtatatttctcctgatgaggttggtctacataaacgcatatacatcccattggttgggttggatagaatagcaatgcacactatcatttcattcattgtctatgtcattcctatcttttttactagtcggaactatatttaattttaaatccgactacacccttacagagtgcgctcgatgagctccatgccgtagtcctccttcagagtcttgataagaggagcacagatgtcccaagtgacgggagcgataacaccctataaccaagttagtataggacctcgagagtaaagagaacaaggggatttggataaacatacagtcttgctgatagtaccgtcgagaacctgcttaacagcaacaccgcaaggaataccaacggtgcgggccatagccgagctgacctcgttaccgtactcgcacagggtggaggtacgggtctccttggagccgtccttgttctcgatctcgaacttgtgctggagcataacaaggtcacgctcgccaggaccgtactgcatcttctgctcgagggtagcgcagagggtgtcgagggcgtttccgcgggggatgatctgctcgtcggagaagagaccgatccagcggagaccggagaggagacgatcacgctcgtcgttgttagggaacttggtcttggatgcgatggcccagtgcagatccttctcgtcggacgaggtcgcgccgagaacctgcttggtggcctccttccatgaagtggccttgtcgaaaacgctgttaggagcgtcgttgaggaaaccaatgtcgaccaggaccttgatcatctcggggaatccctggtagcgaagggtgccgcgaataacggtctgggcctcggggataccgtagcgctcgcggaagggagtctgggaagattagttgactgaaatcgaagtctttgaatgcgtaaatgtcatacagaatcacggttagggtagccgacgaaggcgaacccggggtagatgaagaagggcttagcggtagccatcagatcaggtccgtcgatggacacgatcttaccatctgtattctgcgttagcactctttggctcctgttaaatgtagataaagaatgtaccttggtagatcttggcagcgttacggagggcaagaagcacaccgcggctgagctagttagtcatttgttcaagcaaaacctcagcattggacttctaacctagaccacgagaactagtaacagccatttgtcagttatttatcaaatcggtgaaaattgggtcttcgctaaccttgtatcccaaggggttgttggagcattcgggggcgggcaagctgttgcttgttagctataccccctatagaacatggaaacgattgcacgaaccctccacagaaggaaacaaatccggtaaccttgccgccagcagcgtggacctcgtgaatggtcttgacagcgtctattcctgataagcgtcggtctgttttaacgcatagcatagaaacttacagaggtgatcgagaccagggtcgagaccgatctcgttcatgactgtgataccagcctcgcggcactgctcatccaactccatcatcgcaggggaaacgtaggaggtcgtgaccacatttgtctattgttgcgaattagtcaagtgcctgcttcctctatagaaaccataagtaccttggtacggatagcagacttgatgacggtagcgtggaaagtgtatgggatgagcgagatcacaacgtcggcttggttcagggcagcgtcgagggcggcatcgtcgttgacatcgagggagatagccttggcgttcttgaagccagaggccagggcctgggcactctcaagggtacggcaggctgttacagcagtcagcgatactcaatgtaatgggactccggataaattcaattggacataccgacagtgacctcgacatcagccttgctgaggacctcaacagtgggcttggtgactaccggagatcagaaattagcaaatgtatgtatgactctagaagctcgatgcggggcatgacgcatttaggtctgagagatctggagagattgggaggcgtaccgaagcctgaacccaaaaggagggccttggaaccggcaatttgcttgaccattttgaattaattggtatgatagatgatgttggggtagttcaactggagaacatcgcagtccttcactgtgggaccggtatacggcaagtgactcaatgtcacgtgaaccggtatcggcgcggggtgggcatcaaaatgtcacttcccaccgcctgctgtttgtagctaactgttttcatactgagaagggagatggttgttgggaaggacatccttgtattatgatctatagtaaatatgtaagcaaggaagacagggagagagacggataacaaacataatccatgatttacatgaaagacaaaagctgaagaagcaaaacaggcgcctattcttgtacatcaaacgcggacctccatgcatggatctgacggatagagagtggaggattaggaagtagatgatattttatttacctaggaccgatgtagtgtacggcgatgcatagatatatgctgatatcaagtcaggcgtacccaacagaaactccgcagaaagcaagacgccagtgatgctgaagctgaacaaaaaacagtagacgcagggtatataataggcaatttactatatgtctttgacctttccgccttgactccacagcatcgcgtctgagccttcctcactcaattttgcgtcgccggcaaagttcccctctgcattggggtcctgccgggacttggaaatccgcctctgccatccgagcatcacgggcaagaaatgccacaagtcgaactctggccacatgacattgaggaacacaatctcagtgttctcgtgagtctgccagagcatgaagtcgctcagacgttcgacgcccgaagtgcggatcaggatatccaggggcggggtacccttggtcaacatgtggtcatttagagtctggcgagagatcgtttcgggggagatatagactgggctatctgcctcagccgcgggtctcggtggtgagccgcccttggggtcttgctggtttccgaggtgaagggttgtggaagacgagcaggaagacatcgatccgtagactcggtcggagtagtcgtgccgagggaatgtgtcatcatcctgtcccgaagagccggacgtagactcagaatcactgtgggcctcatgcgtagtcgagccgagcgtctgggcgcggatattatgtgcgatatgggattccgagaagcgggaagcggcagccgcggtgcgaccctgttgaatcggcgtagtatagtcctcgaccgtgtcgcggatagcggaggtgatctcgtcgcgggaggtataggggaagcagatgtttaggacgcggtctccgttgcggctggtcatgtcgacggccttgttgacagcctccaaaacgtcgggtttgagcatgtcaagacggcccaggacacgaacctttgctccgtatcgatcgagcaggtctccgtgttgagccatctgcgacagcttcaccttggccatttccataagcgcatccacctcgaattttgagcgtttgaagttctcaatgctgaacgcgtagattgtgactaccttcactccactcttgtagcagacttcgaggatctatcagtcgttagcatcggccacaaaacgggtgctgcggtgtaacgcggagctgccaaagtgtagcactcactcttgcaagagcttcaaaccccagattatgtccctccactgtctcaattccatgtgatcgggcaaagcgcctgtttccatccatgacaaaagccacatgctgggggacagggccctgtttgagtgcgccgatcagcaattccttaaggcccgtgatggcgtactcggcaggcggagaggcgaggaaccagttccggaggcgtgacatatgcagtgaaccaggcatgatgaatatgtgaaaaagctataatccccttaaactccgcagaaaaattgaggagttggggtatagagactgggatacggggtagaagataaaaggtgcacggttagcggctggccggattcggttttgtagtacaaaacgcgacgtggtcagttatgatgacggtgacaatttttagcagaacattgaggcgatgcaacgaaatagcctaggctgcactattttcatgtgcaattttagattctaagggggctttttctttttctttttctgtttttttgccccctgctgttaacgtctgtgtggcgaggcaaaaatgacctcgggaatcatcagccaagattaggccccgggcaatagccaacttcaataataattggttaaccttggagatgatatagaagtacaggaatgggaataatatccgccttagaaaatgatcagccctatcactccacagtaatacagggcggaaaatagaagcggacctttctacaatatatgtatagggaaacaggcaacgtatctcgtatagaaggagcccctgctgttacctggctgatctctgggggaattataaaacttacatgtatctagttactatatgtactagtaaagattgtagtaactacgtgtatcatgtagatttcaacaatagttagttgccaggtccatggattgtttgatgacgttcataatcataaaaaaaaaaaaaaaaaaaaacagagaggatatcttgaatggctatataagagcaaatacgtacacagcttcgcgccgaacaccgtggttgatggtcgggatgataaagagttaaatgaccaatgcagtagacatctcaaagatcttttcgggactcctcggtgctggatggagttccagggcctgagctggccatatcccagcttccatcttcgctgcgacgtcgacgacgctctccgcgctccctcatggcatcacggatccgtgaactgacgtcctcaagcgggtctttgtgggtgagagcgctgagcggcttcagtccgtgccgagacccggatcgggcactagcagatctgctgcggctacggtcacgactaggaggtcgtgtggagaagaaaccaatgttggccaagttgtggaaggactcgttgcggggcaagggctctgaggagggcattttctcgccatggtccgatacgctggttcttctgatctccggcagtccatgttcggccttggtatcggcattgctcgcttctcggaatggatctgtgacaacccgagcggcgtcaaagtcggggaatagctcaggtcccatggtattaatggcgtctgtcacttgctgagccagtgcagcgcgtctttctcgaagtttcaccagcgtgttggccgatgatgggttcagagacagaacaagcgggcgaagtgacttgatgatgtccatgcctacttcgccgatccgaagagccgcaaacgtgattgtggggaagagcaccataccggcaataactaccaaccaaagtggtacccaatctggaaccattccattgactcggttccagtacgtccaataagtgagggaagcagtgtaaaaggcataaagtgctggagcaaatgcaagggcaataagaagcttccaggttgccatgacatctcggccttgaagtttcaccgtagaagcagccagtgcttccttggacttctttgcggagaggtacttggtcgcaatgaaaacgggggtaaagagcaggagaccgggaagcgtcccgattgtcaagagtgctagtttgcctaagcggtagatcaacgtggccaccacctgcaagatggagaacttggcgtaggccacttggtgatcccggattccaagaagacgaagctgtttgttatatcctacaatagacttgcgcagttcaacgatccggggatcgtccttgaagtgggcgtaccctttcacgagacggcgattcagctccacaaccataggaagaggaagatttttgcctttcgtgttgtacagacgacgggcagcttggatgacctttgaattgttagcggaagcatatatcccgaaacggggagagacttaccataagagtttcataatcgggactagtgacagtgaccgacacgagacttccgtagatgatatccagtaaagcaccgacagactcccgtcgttcaccttgcttgaactgctccactaattccggggggatatcaattggagtaccaaactcgataacggccctggagcggaacttgtgggcatggaaatagttcatgccgcagggcacgattttcaaaccacagtccgggttctcagccagggtgcctagagccatcagggcgacaccagctgtatcatatcagtaagtctgtaaatctctcgagcctcttaaacacaaggagcttacctttcaggggaagcagtgtggtgcgatcatggcttccaccttccgggaagatacccacacagccacctgtgcctagtcttttgaatactgcctcatagactgcggtctgatccacatgcggagcaaccttgaatttggtgcccttgaaatccggatcctgcgcggatgcatctccagtgaaatttccatcacggtcaatgtcttgccgtccagtaagctgggctagcgcatccctgtgcttgaaagccttcttgagcactaattcttccggtcccttgatctcggcgatcgcggtactgtgcgacgttccgttgatggtgggcagggcaatggttccgtccctttcgaaaccctttccctcaaagttggttcccacacctcgcagcagggttggctggttgatcgggtcaggaagatagatggtgccggtaccgggtttcaagttgtccatagcacgtgccacgggcagtgtcccaactgatctcgccaggaatccgatgaacttgcgtttgaaagacttgtccgcaataagccatgagatccgacgttgcgcttcgctgcggatgacgcgcatcaataccaaggaatcgacgaactgggcgaacatccatcattagcatgttgtgtgtgttggaccggaagcgggcggcatacctggttcgcatggggagcagccaccagaatgatgggaccgcggcgggggattttccatgaacctcgagggtgaacttcgcggaagaagaggtcgatgagcacggagaatgtccaaaggaccaaatcatacatccacccaacgaggggtgggatgtactggcctttttctcccattgtgccgtagaagcccaatgggcaatttccgggagggaaagtaggctggaggggtcgtaaaaagggtcgtggaaggcttatgatctcgacatgaagtccctggagaaaagataaacgtgagtacctagttagccggaagagcttgggatccacatacttggctgtttcgagcctcagatcaccacagactatccaatataattgatagagagtcagaacatgagatcaagggaggaacataagaagaggggaagtggaagttcgcatgtggaaggtttgagtgttagcgcgctttgactcggacgcttctagaacgtgacattgctagaacaagttggaacatattgaacttgacttatgtacttatgtatatatctcttatttcttcctatctacttgcaactgttacatgctacataagctaataatgtgatctgtcacacttataaaagctctgatataacccttccagagtgagcacaggccagattatattgcaacatttgcatgacagcataagatcctaatatgagatcaacttccaactttccaactttccaatcaaatatcccaactcgtatatgcagagtgctgggatcgcatcaaagcgtcatgcggctattctaggtcatttttttcccatgggatcggcctaggagctatagccaagtgcatagaagtgcgtaaaacattaagcttaacatggtggagacaatgtgttctatatacatatacctaggtaggtaactacatagtatactgaaattaatatcagaatgatccatacatataaagtatcttttagaaaaaagaaagcgctcagtttctacaccgtacaacagaatattgtgtagaagtttcccttgcaggtctccccgcctgccccgcctttccacttcaactttccctcttgatattgcaagtctgcacttcacttgaaaatccttcgacacagtggctttttgatattgtctcttgggaaaatatacagggcttgctttggtccctcccagccctgtccacaccccaatatccacacacacacacaccaccttctatcttcgaagccgatatccaacctgaccattttcctttggggctgggctgataaaagaaagtatcacatgcgcctggaatgatctcacaatatgtctctcaagtatgcctctgcttccatgactgttcggaccggccaggacccggccaatatgacattatcgaagcatctatactgactgcctagttgggtaatgcttgatgaccaagatggcttcgtccgtcttcccaacgaacgtttgatctactcctcccctcctcgcactagtgtctctttgactccgccctccggatacaaaggcccagaaaaactttcaatccagagcagtgccggctgcatccacctgaccaaccaaagagtcagtattcggccataccaatgcctttacaccgttctaacactcgccaggttgtctaccttcccgcatccagaagcaatgacttccagtccttctcgtcccctctcttgaatgtccatgactcccatgtatctgcgccattctttggacctaatgtatggacagctctggtgcaaccagtatccggaggtggcatttcaccgtccctacctgcagttcagttgaaagtgacattcaaggagggtggagcttttgatttccacaccaacttcgagcggattaaggagcgactcgagcaggctgttgagaacacaagtcaaggcactcgggggcaacaaaacgtggatctctcagctgttcatttggaagagttgcctgcatatgaagctccgcctgatgctagccaagatgctagacccagccagacaccagaagagtcgcaaagcagtcgagcatctgacaccggtgtcgaacccgcggagccgcctccttgttacgaggaggttcagtcacagagtgtagcccatgagctggaggagaggctgcgacgggccacctaatctttctggcctctatttctacgtgccattctatcaaatatttgaactggccttacttttattatctatctcatgtacattatgtccccatcaaattagcaattagcgatacgaaagcggtgctcacgcacttagaaatggagatacgagttgatatgctcgacaacgtttattctcagcgaaccatagtagaagtatcccatatctctgaaatccttagatgtagcagaaactactccagtaataacttccccataaactgcacttgttaaaccccaaatggtgttggaggccactggccaatcacgtgcggcataattggcgtctctcagcggccgggcctttccgattttccagtccgaaagaagcagctcttgggcaaaaccaacaacctccctcaattaccacacccccttccgctttccccccacacaagacctccggtcatctttcaattgatctctgtcgcaatgggtctctacgaacttgtctctgacgccttctcctccttcgggttcaccgaggcccaggctgaggctcccgctcaagacaccgagaccgagactactactcaggaagagcccgccgagaaggaggagcccacctccaccgagagcgccgagaccgagtccactgagtctgagtccgctgaggaggcccaacctgcggaagcgcctgccgaggagtctgccgaggaggctcctgaggaggaggaggctgaggccgaggaggaggaagaggaagaagaggaggaggaagagcctgaggaccccaagcccaagcttgaggagggtgagtgaccgtgctgatttttccgacctttgcttttctattcgcgtgtcattgtcgcctatgccatgcaatcgttgaacatgagctgttgttcgcaccaattggtcttttgtgtcaaggtccgcctgggtcataaaatcgccaatggcattgcaaatacgaatttaccggatttctcgatcggagactaactatctttctcagagtgcgcccactccgccgtctgcgctccctacaagcaccactacgatgagtgcgttgagcgcgtcacccgccagcaggaggatgaggatttcaagggccccaaggaggattgcgtcgaggagtgtaagtgcaattgacaccgatggaattggctccaatcgagtcctgattgtgcgactaacataacccagtcttccacctcactcactgcgtgaccgcctgcgctgcccccaagctctggagggagctgaagtaaacgactcttccattgagtcttgatttcggcgttccatccaaccctcgcatcgatttggcccacgaataaccttcgacctctactgcgtcgctacggggatcccttggaccgaaacgccggaagaaaaaccgatcccactttcatgatggctgccaaggtggattgatagcctggtagcttgccgccttggattgagaacgcaggatcgatccagaaacatgaaattttgtttctgattgttccttgcgtatgtgtgcgcatatgtattgtgttttcaaggtaggggggagggctcagaggcagcaacaaagaataatagatcatttgccctcctctttcagccttgcgtgtacagatagctggtcttccgcctgttcgaactgtgctttgtttattctcttgttttaaaacgaatctcatctgtttaggttggcattgtgctctggtaggctaggcttatagcggtcatccagctacaagaaccatataactcggttcagtattgttatggccgaattatcgatacgtaagtatgctcaggtcgtcaaccaggactaatatatcgacccaaatcgcatcaagccgctataggtgagcacaaattcgagatgttagggtaacataaatggggtataacttgagctgactagggccaacagaaacaaagaaccctgatagcgacatagtcctcaagtcttgatcagagtatcggtatccgcagcagactcatcagacctgaccctcttaacattatcaaccggcccagcctcctccccaacctgctccaactcaacgccgcgatcaacatcccacctacgacgatgaacagccctcccaaagagcccaatcgtcatgggaaacggcgcagccacaacagcaacaacagccgcaaatatcaacgcattccgcatattatacggtggcgcagccccatccccagccttcaacgcatcctgaataagaatgaaacacgcaccaagcaactgtccgcccgtccagcagatggtactcccaatctccgacgagagcggataagtaatctcagccaggtattctagcacaataggcagcatggcgaacgaggccgcgcccagcagcgccataaccacatacgaaggcgggattcccgccgcactgcccggcgcgaaaatcagcccgatatacgtgacggccaccacaggaactagcacccggatactgccaaggtagtgcttgtaccggtctgttatcggtgacataattgccgacgcgaccagtcccaccacgatcaggatggcgcctgcgatgcctgcttctgtctccgagaacccgtgcggactgaggatttggtttagcagtgaggagacgctgttgaagaagcccacgtatacagagaaggggatgaagatctgccagaattcccgcgtgcgggttagttcgcgcactgctgcgcctagtggcgtgtgcggcttcgcggaggatgcgcttgcgggtgttggtggtgatgctgggaggaagaatgatgggattgctgcgacggtggactattgatttacatggtgtgagcgagggggggaaggaccaatgggtgggttgggatttcttcgggggttgggtttcacgtacgatgattgagatgtacaggaccatatttggaatatcggagggtttcgacgcccactccgagtcgactagctggcccagggctgcgccgagtgggttcgcgagactggcgactgctgttgcacttgtacggcctttgtcggagaaccaaagctcgctgtatcgggttggtgcgcagaggcagaagggttgcgcgaaccctattaggatctgaccgaacatcgcgagcccgtagatgccgccgttcgctctggtgccggcatatctgagccagtttccgactagtaggagcgtggcggtggtgattatggctggtttggggccgcctttgttcaggatccagatgacgatgctgggaatcttgttaatgaatgtgatacctggggcggatctttttttctcttgctttctctcgcttttcaaacggcgacgtatgcttacttacgggctgacaacgcagaaggcgaacagatagccagtgctcatccagttaatagcgctctctgagacatcgaagtactccgcggccgttgtcgagatggacgagaaggtcaaccactgtatatgtgagtcagcaacatgcaaggtcggtatatggatcaatcgtgaggtagcgcatacatcccaactgacgacgatattcagcaataccagctgtgccaggccccagaagcgtcgcttatagaccttgtagacaggccgagagccctgctcggtagttggagagcgctcaaaagtcgacatgtccacagcgaattctgacagaccagattcattctgtgcgggcttctataaggaaatgcaacaaagcgggcatatcacatctttttagtctcttggccttttctatgtcactctgggggatccgaggcacgcgaacccgggggtacttggcggtacttgatcagccctgctgtgacgttgcattgcgcaagtactatctagtactggaagtacacagcggggttgactgttgaaccatgtgagatgttatattaaattataaatgtaggatattagagatgttttgttgcgaagtactatgctgtatatctacaatataatggattctgaaatcatctgagacaaagaaagtggaaatgaccttggaacttatctcgtatacgtattcaggggtaactccctctatgatatccatatctacgtgtacaatatacacatattctacatatggagtgttcgatcgaacatatcattttatgtagaaattgccgtggctgaactctgaactctaaggcgatgccgatcgtgtgtgtgttcctccttcactccccgccatcttttatttaggatcactacctttgctaaatatacaatccctttccactattctcccaactaagacctactacatttccctccgatctcaaactcctggattcatgatgcccgacgcccgttcctgaatttcccctgaccattctacccggagagacctcggccattgaacgaccatgaatatcagtatgcgctccagcctatcctcctacggggacccgcggtatctctcgaccatgaccgcctccgatgctccagctccagtgccaccgcacggaaagacactcgtggacgggtatcgggatgctatggacccccagcatgaggagcggtcacgatacaacccagtgagtagagacacaacacgccaatctgggactccagctgaccatggcctcttcatttctggcagctcaacccgactcacccgcgaagctcggttctgctgaacgccaacgaccccgtggccatgtacctgttgaccgaaaccgccataggggatagcacgaattacgaagtcctatccctcgaggaggtggaagagctgaagaaggaagtcgcattgctctccacgcgcatccatggcacgaaacggaaactggcgctcgaaaccaaactgcgtgacgcggcacagtctctcggtaggctctacagcccgcccagcccgcggagcagcggcgaatacggcgccaatggcagttcgaactcgccccggatgagccggggtatatttggtcgtagcggggcttccgaggccctcgacaagagcgattccgaactcgcggtcagccagcggcgatgtgaggagctggcgcaggaactctggaagctggagaaaaggtctcagacgatcaaccagcgcttgttggagcacactgcgggtgtcttgcagatcacgcacaagggtctcaagaaaggtcccaagaaccctgctcgcacttcggatggcgattatgatgatcacaaattcgacgatcgcagtctttaccggacaaccggacatttggataactttggcgtgaacgggaagatcgagaccaacgcggccgccgtaatgaataccgaggccatgcaggccacagaacgccgattggaggaacttagcgagcgcatgcatgacatgatgatacagtctaatccgggtgaattcatcgatcctcctccgcagctgtcaggcggtggagggcccgtcaatcttacagcaacggtcgacgctcacttggagtatatcaagaatggcatgaataatatcgtcttacataggggagacgttccggctcctacggctgctcgcgatatctcccctgaagccgagggcacctggaaacaccaactcaccgaaatcaacaaccaagtgcaaaccattgttgaccggtttggtttgacccgttcgccaaccttgcctccgccccctgacgcgtctcacggtgaggggctggaagagcaactctcataccttcaggctggtgtagatggcctggagagtcgagtggatggagtgcttgaacagaagagtattctcaccacgcaaatccagcagcaacgcgagctcaactccaagtcggacgccgaacgcgatgctcatatcggcgacctgacggaacagttgacccatgttcgcagagatcttgaagtatctgagcgtgaagccaacgccagtcgcgacgagctggctcttgtcatggaacagctcaacgcaatgcgccacaatggctcttcccaggacgaagccaaggcgactctagttcaggccgagggcgaagtcgcgcgtttgcaaagcgttgtttcctcgttgcacaccgaagctgatgccaggatcaacgaagtcagcgaagcccgagaagcccaagataaagcagaagctgaggtcaagcgcctgcaacaatacatcgacgatgtgcagagagacaacaatgccaaatccgaggaagtcagtaatgcccgcgaccgcgcagaaggtgaggtcaagcgcttacaggccgtcattgtatcattgcaaaatgataccgatgctaagagcgaagaggccagagaggctcgcgaccatgcggaagaagaagtgaagcgcctgcaagtcatcattacatctttgcagaatgatggcgatgctaagagtgaagaggtcagagagaccaaagaggcccacggccatgcggaagacgaagtgaagcgtctacaggtcgtcattgcatcgctgcagaatgataccgacgctaagagccaagaagccagagaggctcgcgaccatgcggaagatgaagtcaagcgtctccaggcggccattacgtcgttgcagaatgataccgatgctaagttgaaagaggccatagaggcccgagatcgtgcggaagacgaagtcaagcgtctacatggcgttattgagactttgcaaaatgacaccgatactggaggcgaggacgtcaaggaagcccgggaccgcgcggagaacgaggttcaacgcctgcagagcctcgttgaaacactgcagaacgatagcgattctagatccgaggaagttaggggtgcccgtgaccgcgcagagcaagaggttgctcaactcgaagccgctatccaacagattcgagttcaatctgatgcccgtattaaggaagcggatgatcaacgcgcggagtccgaccacaacgccactcgcctgcagaatgagttgactgagcttgaaggcgagattgtgcgggtcacaactgaactgacgatggccaaagcagagctggatggtgcttatggtactcgagccgaacgcgcagcagaggtggctgccaaccctagtatccaaagggagaatgatgcactggttacgcgaaatatcgagctcaccgaagaactggctgctctgaagagccagcgaggaggtggcgatcttcagcagcgggcggatactcttgaaagagaacttcgcgagaccatcgatgactacgaagccatgacgaaagccagcatcgagtttgagaaggaacgcgagcgcttcgaaagtttcattgacagtcttcgggatcgttgcgagcaactcgagacacaactggcggaagaacgtattagctggatgaacttgagtagtcccacatctataggccgcgacggcacttctgagacgacatctaccatggtgctcaagaatgagttcaagaagatgatgcgtgacacgcgcaacgagaacatgaagatactgagggtaagttgtattgtacctttctgtcttttcgaactaactgacacctcccaggccgaacaagaagagcgtcgcaggattgagggattgctgcgagccctaagaaaggaacacgcccaggtgactggcaagccaatgcccagcccaggtggcactccattatgatcatgacattcaacgttttcgggtttagagcgcatatccatttaagagtgtacatatagactgttttgtataatattctcgtttggcttgatctcggcaggcacgatgagggttttcgaggaaatcacatactcatctttgatattcccaccttttcctctctctctctctctctctctccccctatatctaatcttaaggcttcgctcttttgccttcaagatgatttcccgaagaatcgaccagtctagtaacgctcattcgcagtctttttcagcatcacagaacctccgacggagaagacacgattccgactccatttcagcatacgataaccccgactcatctgagtccgtcctaagcgatgaacgatctatatacaatgcgatcagagtcaccacgccaaatgaatccagccctcgcttctatgcgtctctcctcaacgagaaccccgttcacgagcaaggcttagcggtaaacatggccagattcgttcctacagattcgcaagatgatcatactcctatcaatgcggcagtcaggcgaggaaggcgacagagaatcatagggaagcttgggaatcacaccaagctgttatccgaccagtactggcaagccacacaccggtcgagacctgatttgagtggaacgacatcggtgccagactcccatcagtctttgcgtcgcaaggctctttccctcgatgatggtagtgtccgtaggcctagatggcctgggagcttgggacctgctgtaacgaccgtccaacctcgatatccaccgccagaaagaacgcctacaccccctggccttccctccttcggcacatcagaggctatgaacatctcccaacggttcatgatcccagccaatagtgcacggtcacacgcaaacttgcaaggtggtggtcctgctggtcagcgtggcggttcgtatagcgacacactaaggagactatttggcttgccgtcttctgcgtctcatgctagtggaatttccgtcaatggtataggaagagctgaggatggcacgctggtacagggccggttcccacatcgacaaagtggccatggaatgcatgtcggtcgaccgctacatgaccaccctttccaccaacgcaatcttccgattgcccgccacgaagccgcagatacaagtcatgatccttattttgaagccacacacacaaaaggtggtcctggaggaagcccaagcaggcgtgcccagcctgtgaccacgtcctcgtccagacccttactaacgaacccggcccctgctgtggtaaaccgtccaccgcggcccagggccactgcacttctcagtttatcacgcaatttggctggatcaaatggccctacggattcagcggaatcttctgcccaagggaccagagcaactggagatcatctccctcccaatccatcgcggctgcattcggtcatcacgatggctgtctgtggcggcggtgcagatgaaggttcccgtgcaaacacgccggtctgtccggacattttgtcctgggtgaaatcccatacttgcctctgctgctgctcaggcggccacgaggagtcggatgattcgctcggggcaaccagctcgcgggacacatatgtaaccgcccaaagccaggcatcgcctactgcatctcagaatgaaaacagtgaggggaatacccatatccatggcttccaggcatggatctcatctctgtatggtgtcatgttcccagcctttgtgaaccctgccgctgtataatccttcgttgaagtatatgcgtctccacgacttgttggattgctactgtggtgctgttttctttcttttatgtatgctcaatgcgcaaacgtcttgctggatacatagtcttatcattaactcgaacgtgttctcccgccttgcttctgtacatacggtacgatttcctctgccacgtcttggcgtactctcgatatcatctccaagctcgaataaggctggtcttgtacaatgccttttcttttcttttctttttttccccagctgaggccttctgtccagaatgatttctagaatagctaggttcattgtcccttgagattccacagcccgcgcagatccacagtaatacgatctaccatggatcatcggtgctgtaggacgttaaaagacactagcatttcagatttagccgttgaagcattcaaatattctacgctattacagagtacaacgaaatagccctggagtttgcctaataaggaaatagctatgctcggagtaggtgtatgaacccaactatcagcacatttaccgttaccttccaaggttatctcttgaaattagtagcatacacgttcactgtttacgggggaatttggatttctgttttcaatgacattgatatagctacataatcagagatcgggtcccatgacggagatgtgatgatcctgaggcctgccctagttatacgtttgtccacaatctcctctcatattccatcccccctttctcaatagccagtggcccacacctatgcctctttccatcggatcaaatcaatccgaatttagcaggaggaaagagaagtctggcccttgcaggaatcagtcgaatcgagcttggggctctcacggtcctcagacttctcaacaccctcgtactcctggcacacgtggctgacatcagatccacaggtgtcgctgacgctggaggtatcgccgtagttggagttgattccaatcaagctagagacgccggaggcctggacgttcttgacgaccacgtgacgggggctcttgctcttgttgttgctgcagttgccgcaggagcggtagagcttaccggcgttgacaacggtgaatccgtcaatggtgacggttccggcaccgttgtgctgaatgaccttgtcgctggcctcctgggcgccaccacccttgatgagggcatcgccgtttccgacaatggagatggcgtcctatggggacgcgttagtatcggtggaccaggtcaatcatgggattactcgttactcacctcgcagacatcgcggaaccagacgttggtcagagtgcaggatccctcgcagtggatgccctcgagctggttctctccaatgatgacgttgctcagggatgcgccgtccttcaggatgaacacggcgttgtcatcgcctatatccggttagctctgttgtctggttctcgtttttgatatgggcataccagtgtcctcatcactgtcgcaggcacgaccacggtcgtactcgccgttgcccaggtcgacatcgccagaaatctcactaggagaaggcagagagacaatgtcacccacgcgagaggggatgttgagagtctgggcactggcaatgccaatgagaccgaggaggatagcgctggagtgcattttgttcgattgatggttgatgctggacagttgatcaaaatcgagggtcgacaaggagccttttataccttttggagctctaattgctccaacaagacaggacctaccccgtgctgtttcagtcacatacaccctaactgcaggacgcctcaatatccatgaaggaattctgtgacctctgactggatggaattaccccacgactcctacaaggtaatgcagggcctgggtcataatccgggccggatatcgaccttccgcaggaacataagacattttctaacaccttattttccgtcttggcgcttcattgcgtagccaataccaaagcatagttatattgaaaatgcgaaaagccaagatgccaagattcgaaagcttttggcattgtggctgtgtctgcaagcttgaaactcccgcatttacaagatccaccaaccaaagaaattgttgagcctctggcaagttttgcatggatactataggtgcttaatcttgggacttggaaggcgagaggaaactgactgcgtttagggagaggatgaatctatggagaagccatggagatatgccggaactagtcctctcggtatatgtatactagtatacgcactagtttatgtacatagctaactaactatatagagctaactagattgatcttaaattggactacaccgcactgtggggccggattaattcccctttagggactaatatggactaatatggatgaagtgctcagtgctccgtatggagcacatagatcccccttgactcactctgtacgtcaagtaaaatcagagagagcggccacggggaagtcgaaatgtaatcggagtcagctcagagtcagcccaggggaagctctgccggagaattactcgaatctgacttggccattgaaacggccgagtagccaaataggcaagttccaggtagatcgatggatatcttgttttgaacatgagatgcacagaatcatgattgtttgctatcatagctataatgggaaacattttcaagcccttcgcaatcacatagatgcatgtatttagtataggttagacctctactccgtacgtatactcggatcaatcctcgtaatcacccagaaaccgaaaaagtccaatccctcggaaacaaaccatactgcacatcatccctatcccggaagatatcatcataatgcggaatacaggtctgcggatcctcagcctgggcatagtacctatcccccaacgccttaaacaccggatcattccacatcttggccatccacgccagcacatcaggcccagccccatctagcgaaaggccataagagcggaaccgctgtatccgaggatcagccggtgcccagattacttctaggatttttgttgggaaaaggaagaaagaaacccacccaaagaaccggccagaagaacgcatccgcaatactaaacccaccaaacaaaaacccttcgtcaacctcccccagctgcacaagtcgctctgccgtcgccttccgcgccgaatcccagatccgcaacatacgcgctatctccgcagccgcgccgtctgggatcggcacgttgcccgtgtacctggcgaggaagtttgtgtggaaggtattgcgcaggactgggaagccggaatgcattttggctgtggtgctgcgggctagggcgcgcaggtggcggtctttgggccagagggggagggttgggtttgattcagcgaggaattcgcagatggcgagggagtctgttattgttgttgaagggagggagtggcattggaggattgggaccagacctgttggggaacaggcttttatctgttgtttgttttttttttttttttgtgagtgagtgtatacttggctggggttgtgttgaggatgtaggtatgtacttcggagagctgtatgaattggcgtgtatgggggatctggaagtattctagtactgcctcgacgcgtgctgtccagcctatttgaagagggcttgttaggtctggtgtatggtctgttgcatgttgcttactggagtagcgggtgtgtagcccgatcaggtggtagtctgggttcgggacagccatgatatgtagaaatgaagtgaggtggatgaagttaacctggaatagatgtgagtccgggagaacttccaagttatatatatatccatggatattgcggggtatagttatgagtcacataagatttgatgcccccccaattgagatggaggcaagcctggttttatacccatgagattgtcttgagattcgaacctttctgattgatgctagtcataatgctatggatcaaatgccacaccggcgccatgcaagaagataacaatgagatcgaataagaagataaaaaaagaaactccgaaagagatatgagaatgggatagcctgcaatgactcctaacacggaagtcaagataagaaatacatcattaaacggaaagcaagggcccatcatatgtatatgacacaacattgagaagaaggacaaggagagaacaaggggacccggggaaatagagggaaagcgggaaagcaagtaacaatgcaccaggcaaaggaaacacaacgtgatcgcatggatgctaataataggaaatcgtcaaatgaattgagtcgtctcttcgtcagagttcacaattcgcgcccagtaaagggcgatgcaggaggtgcaccgaagtaaaacaagaacagatgctggtattaaaaggcgtggcgtacaggcgagaggaagcttaaagccccttgaagaatggactcgcctcaattatatattcatcatcgcaggcgaaatcccatcctacaatgcgagggtccacgctggcacagatgagcttccgtgcgtcaaactggagtttgaacaccctcgcagctgtcgaggacccttgaagtcgacgctgatggccatggtggtgatgatgatgagcaggaggtgggttgagtggcagggcattgataaccagaggaggcacaaattgtgggttggcacgaccagcgtgggggttggcattggcattttgcccaagtgccgccagagcctgcgctgcttgcaagtgttgagcctgggccgcaacagtggttcgtgccacttggctgaggctcgcacgagcggaattggcgagggcatcactgtgtcgcagttgatgatcagttatccacctgttatcacggtctttgtgccagattaagattgactcgtcgtaggaaccggacacgatacgggcccagctactacctccgccaccgggtgggatttttgctcccagagcagggatatcgcgagggtcccgtgatccagcagtgttcggttggtagccattgcggcgttgttcccgatgacccatgtcgacgtccaatccggcctcttgtgcggcgaagaacgcagcttcacatgctcgcgcttctccgcgcaaggtttcatcggctcccggggcatcaccaaaccctgcctgaagggtgcgcacgagattactatgagctcgcagacacgccacctcagctccggtggcatgatcgtagatgcgaacagagttatcattgctgccactgatgattcttcggctgtcgaactcaacacatgcgatacctttctcgtgacccagcaaggtcttcgagcaagcaccagtgcggatgttccagaccttgatcactcgatccccagacgccgtcacaatatcatcaccatggatctgcatcgcattcacggcggctccatgtccttccacggtcataagcaaggtgtaaggctctagggctttgtattgctcacgcgcaattccagcttcaagaacgttcggtgcaaccgcgttcagatctactatccatgtagggtatgtggcacctgatccatggcagatacgcggataatccttgctgttcggcagaagatcccggcggttccataccttcacagttcggtctttggaacatgttacaaggtagcgatggtcgaatttgagattgagcacggagtcagtatgcgcttgttcaatttgatgaatcttttctccggtggagaacttccatacaatgacggacttatcgctgctgccggagatgatgatgttttcctcgggctgaggatcaaattgcaggcaaaggacggacttgatatgtcccaccagcgggggatgccacagtcgtttggtatccaggttccagactcgcacagttttgtctcggcttccactaactagccaccggccttcgaactggatcgcatatacgcattctcggtgggcttcttctgggtgggacgggtcaggaagttggaaattggtgtatcggccttgatgccaatttgcttcgagccgcctgcgttgcttgtagatatggaaatagttgactttagcgcttccatcggtatcccgaatgagtagatgcgagcgtagaggtggatagagtggcgaaggagattgggagatattcgtcggcaaagtgaactccgggtcgtcagttgacgaaggtgcagcttgatcgtcatcatcagtcatgtagtgatcaccttcactgtcggccaccgggggctcggggccaaacacggtcggctttgggtttccaccgcttcgggaatcgagccaagtagacggcacgcgctttttctgcttaggttccccgagatctggttccgagtgtcgtaggcgggactttcgagtctgaggcgacatggcctcggaatgttcttgttcaaacgtacgaatcgcgctcgtgtccatgtcccaaccttcatggatgtagtggaatctccatagacctgagtcaaggatacgttcacgccatgaacgagacgcaagcgaggcattcaagagcgtccgagcgtcgaggtaggtgaagatctcccatgtgacttccggtggaagcctgacacatgggtcaatatggaggatagggttaaggcgatcaactactgcggcgatgctagaggttcgaagagaccgaagaaggctgtatgcaagctctggaggtgggaaaccatcggttagcaaggaaaaatcgcaaagtgacaagcaaaagcggccgatgcttcgcgctcgtagcgattaccacagggaccaagggaaagggatatcttaccagctctgccggcctcggattgggcgagcacccaatttggaagcgccatgacattgtccgatccgagatctttgtcggcctggcttcgagtatcatccgagtagccttcatctagcttaaaggagggcgacagagaaagcgctgggaactcggggacggtagttgtctgcaattgtagtgtaggggagattcgagtatcaggagcatcaggagcgtcgggtaagggctcaccctccattgatgcgggttttcagaggggtctgcgccgagttgatgagtcgaacgccgagatcaatggcgttgcgcgatgggtgcgaaatcccgcaataacttcccgcgaagagagtatagagaattaatgaatgagggtagggttctttgcaagacagttgggcaaaggaaggaggttgagcagacgggttggcatcggtgcatgtcacgtcacgtttggacgaggcgaggcccaccgtaaagattgatagagcacaattatcgcgaacttcaagtcgcatgaaaagaaaaggggaacttcaatttttccgaattgtaaaagaaaaagaaaaagtagaatttcaatttacatgtggagtcgcctttaagagtctcttatcactcgaagtacagtaataataaatatgtttgattatgtacatatgttgtaggtaggcgcgcatggatgaacgggggagtcacgtggttggagtctatagggctgtagcaaaacatactgagttgcttacccagtacctaaggtaggtactatctagctacttcatgagaaaatcaggtactgacaaagacgagtctattaacgcttctaagaaaacagagaggggccgattcccccaatgtgtcgtatagtcttgtatggccgtagaagtatgttgtgagcatctcatagcatctctgttctattagatccagattcccctatattctgcagggctaggccatagctatgattagaggggataccacatgtctacatttgtatggaaaatggatagcactaattgcattctgaaaatgggtgctaatatagctgttacgaagggaatcgataaatcccaagtgctgtcttacaatcgcacgggccatttctaggcgctaaagacaagagataatgacgctctagagcagaaacgtttcatagtaagtacagttagttataatcttcaaatgttatcttgtgcattgaatataccttttgtatgcgagccccatataaaaggtacatacgattgtcctatataaatcgcgttacgctcggatactccagggctctcccttctctccctctagtcctccccatgccccaaaggcctgggctgccctagccctggtccctccagggctccagggcttccaaggtggatgacacaagcaagaactgcccctctccacaccacaccgccccataaaacacacgctaaaccctttgaggcaactgaacagactccttcggctcaccctctctccaaggatcctattcctctgtttcatcagcagaactttcgttgtgcttgctcttgtcatttttggttcttggcctcgttctaactgccgagcccgtcttgctgtagcttcacttatactatcattccgtgcgcccccccccctttttactcgggacgtcgattgtcctccgctgagtcctagtgactggccctttcgcaaaggtgttcctccgaactctcctttatttgatttgactcgcatgcccggctgcagcggtcatctaaacatttgaatcccaacaccccatcgattggggttggctgcaggtcggaatatattcctcgagcccctccttttcctccaggaagtgacagtgtatcgtatttgatacccgcgctatcggttcaaacaaatatatctatatttattacctgttgtctctgacgctcgagagcgcttccccgggaaacgcatttaaatcgatcacgcctgcgaccgagtaccgatcggatcgctgttgcccccccccccccnnnnnnnnnnnnnnnnnnnnnnnnnnnnnnnnnnnnnnnnnnnnnnnnnnnnnnnnnnnnnnnnnnnnnnnnnnnnnnnnnnnnnnnnnnnnnnnnnnnnncccccccccccccccccccccgcggaattccgagcgaaactcttgattgacacctccctgcaccacgcagctcacacccaaccggggaactcatgatcgtcatctctttatttccgacgcttgtcgatccctccgaacctatcccgcttgggtctgctgtgcagatttaagttgagcctggctggtctaactcatctatatctggacctcgaggaaattcgatatgattgactcttcaaccatgagcggcgctccggtcgccgaggataacattatcaatcgccgcggtggagaatcgatctaccagagctgcgtcaatttgaagaggcggctatccgaagttcccaacttcgagtcatacctgcaagagatggatgatgatgatcgcatgagaggaaatacagatccggtggcttccttgtggaattgccttagaaatggctatccgctgttgagcatttataatgcatctggtcccgatgagccactagaaattgatcctggcaaggtaactgaggcgaagcgtccaaaagcggcaaccttcaaattcctacaggcctgtttacaagacctggcattccctcagcaggattgctttttgatcaccgacctttacggcgagagcaccaccggcttcatcaaagtgatcaaaatggtcaaccgcgtcgtggacattctcgaaatgcaaggtcaattaaagcaatctgaagttctagaggctcccgcgaaggccaatgtgaagcttaccaagcgggagcatattctaaaggaacttctggaaacggagcgtgactatgttcatcacctgcaaaatctccaagccctcaagaaggaactggaagagacgggtgctttgacaggtgatgcgagccatcagattttcctcaacttaaacaacctactagactttgcccaacggttcctgattcgcatggagcagcactacgccttgccagaagaaatgcagaactggggtgagcttttcttccagcatgaagatgctttccggcaatatgagcctttcattgccaaccagatgcgttgtgacgaagcttgtatgaaggaatgggacaaaatccaaagtgcgccacgccacatagatctgcaacaaatggtcgctcagccgaaaacgctcaatggattctttgtgaaacccttccagcgtttgactcgatacccgctgatgctcttggtaagcttgctgaatgctgggttcaagatcaatgagctaatatggctgtaccttctcaggagctacgcaaacaattagaagacgagaagctccaggccgatatcacacatgcagtcgactgtattcagaatgtgctggactttgctaacgaggcgatccacaaagaacatttggctgcggcggtagttgatctatctgagcgcgtggatgactggaaagcattgaagatggagtcatttggagatctccttcgatttggcactttccaggttgtcaagggggatagtggaaaggatagcgagagagaggtacgtggtcttactttctgcgtcttacgctttcttgttccccgaaatggaacatcactaacatggcgcctagtaccatatctatctcttcgagcgaatacttctctgttgcaaagatatcaaccccaacaagcaaaagtcaaagcttatgatgcagaaagataagccgtctttgactgcgaaaggaaaggctcgtcttcaactgaaaggtcgaatctacatggccaacgtcacagatatcgtttgtctccaaaagcctggtaagcattactcttggcttgttaggttaagagatatgcctctaatcgattccaacaggactctaccgtattcagattttctggaaaggggaccctggtgttgtcgacaattttatcatccgatatgcaaatgaagacaccatgcgaaattggtacaaggacattgacacccaacgggcgatccaagcagagcgacgcactttgcgcaatactggtacatccgacagcgagttcacgtacatggagggcatggcgaacatgcccaacccgtatcaacaagagtatgataccgacgacgccaacagcaaagatccatatcattccgaattccctatgagccgaaatgcctccagtactagtctgagaacccgatctgccaccggtagcagcgccacctctgttcctcaccccaacgctcgaccgcgctatgcgggcactgatccaacgctttcggtgcacactcagttctccggcagcgggagcatgtcccctggtgatcgaaacatgagctcctacttttcccccacggcggagactccgtccacgagatcgagttctcaatctgcaggcttctccttcagtcgtcagaatacaaattccaccactccatcatccgtctggaatgaggattcccttcgctacacagcaccagcgttgtctcgtgtaacatcacgagaagggtcaacctctggcggatatttcccacctcagccaagtggaagaggtgctcagcgcccgtcgttgcctccactctcgggcccccaggctcactccgcaaatggcatgacccagcggatgcgctcggctagtagccctgatattcaccatcacaataacaatcccgagtcacgacgttatatgggagtgcacactatgcagacagtggacaatgtccccgtgccaccgattcctgcgcacatggccaacatgaaagcccccgtcagccgcagccagaacggttcgcccaccaacacccagctccccattcgtacccagccccaactccacaccacgcatttcaatgagccggaatataacgatacccgccactctgggcaaatctccgaccatgccacatcgcccctgacccaggagcccgaggaaggagactacatgcccactcaactcaaggccaaagtgaactttgacgacaactatgtcacgcttgtaattgcgaccaacatcttgttccgttcactgacggaccgcgtggatgccaaactcgctcggttcacggatcggtccatcggaagcaaaaccgttcgactgcgctaccgcgacgaagacggtgatttcgtcacgattgatagcgacgaggcggtccagcttgctttcatggagtggcgggaacaacaccgtgatatgctcgccaagggcttggtgggggagattcaactctactgccaggtggtcgattagattattcgttgtctttgctttcccgctcattcttgacttaataccttccttgattccccccctgcgaggatcgcatcgatccccgtcttctcaacgctttgcatcgccttggcgctcgttcttcccatcctgaccctcattgttccaactggattggcttgaaactgttgagcagccgttctcgggggagatacttctctctatctccccttctttgtgactttcagcgagccatgtggcaaacatgtagttggattgtggcgtctccgtgcgagcatctaatgatttgtttacggcatgaatgatgtcctggtgacgaggtgaagggaatgtctaaaatgacgtccctgcattgttttgaatttgcgttcccatttggattgttatctctttactgatctagtcaatgtccacgaacgtacgaagcttctatatgatgtatatgcctattattttctggggtttcatggaattatacaaagaccttttcccaattcgtatccacttgcctatctgatcgggatgccgcagtcgggtcgccgataattcttggcagggccagatttgctatagctatagctataactgtagctatagcttcatagctctagagctatatgtatagtgtttattgtatgtacttctatacctctacccatgtagcccccgacaatatcggctacggtttggagcaaaatactgtttactgtttataaaataccccaactatgcgctattaatgtgttggaggcggagcgcctggtggtcctgacgcccgagggaattaggaaaagagcagaggtcggtgatttcgtcgaatcgtcgcccagtatttggctgtctcttttttgaaaaggaacccggctcggtgtaaacttgtttttatttattttttttttcactttgcccccttcccacttcccaaaatcatcattcttttcataaaagagattgagactgcaagcattttatacaaaaaagcaaagactcgccaagaatgtcgttctccggccgccgcctaagcatcctgcgcccctctgagaatcgccggttatcgaccaccaaggacctgacggacaatggtgcgtatacaatatcacgtttctaaatgacttttctaactttcaaccccttcagaactcagatcagaaacccatcggcaatttcgagccgctcatgaaggtcaccgaccccacgccggccttgacgcttctcgtgcctccaccggtgtcgtctggtgcacagagcgagcctccgagcatggctacgctgaggatcccaccggctgggcgaacctaggccagggagcccccgaggccgacgacgaaatcgagggaagtttccctcgcccgacctccattcccatcacctccgctgcccgggagtatggcccgaccgccggtatcaagccattgcgtgccgccgtcgctcgtctgtacaacgaccactaccgccagggcaaggagagccagtatacctgggagaatgtctgcattgttcccggtggccgcgccggtctaattcgcattgctgccatcctgggcaactcgtacctgtccttccccatccccgactactctgcgtactcggagatgttgactctgtttaagaacgtacgtcgttaggagagctgagctgagctgagctgagctggggtgtgttatcgtttactgattctcctgcagattgctcccattcccctccccctctcaaaggatgaccactaccacattcaccccaacaagatcgctgaggaaatcgcccgtggcacccaagtgctgctgacttccaacccccgtaaccccaccggccacttcgtgccgcaagacgagctggcggagatccaggacctctgccgtgaccgcgcgaccctcatcctggacgagttctacggcggatacaactacacaacgggctgcgacggatcgacgatcagtggtgctgcgaacgtcgtcgacgtcaacaaggatggtatgatagatacccttcagaccctaatttcctacaccaaactaaccccaaccacagacgttcttctgatcgacggactcacgaagcgtttccgtctccccggctggcgaattgcgtgggtggtcggtcccaaagacttcgtcgacgccctcggctcggcaggctcgtacctcgacggcggcgcaaacgtgccgttccaagaagccgcgatcccgatgctggagccgtcgttggttcgcactgagatgaaggcgctgcagagccacttcatggagaagcgcgactacgtcctgggccgtctctacgatatcggcttccgtgtccaggacgtccctggggcgaccttctatatctggcttgatctcacttcgctcgacccgcccctgccggagcaggctaacatctctgacggcctgaacttcttcaatgccctgctgagcgagaaggtcattgttgtccctggtattttctttgacttgaacccggcgaagcgtcgtgatctcttcgacagcccgtgtcaccacttcgtccgtctgagctacgggcctaggatggatgtgttgaagatgggtctggatggtattgagcgtgttgttaaccgtgcgcgtgagatggctgtgacgaagtgggaggatgaggttgctgtttcggatgattaggcttttcaatcttgatacttgggacatttggtctggtcttgactttggttgttgtcaggctctgatcggcgtcttggctgagactagcgtaataaattgcattatctcatttttttaaatattatttggcttgctagctagggtagttgagaagtgttttatagcagtagaaaggtttagcaatgagggatagcagtacttcgaagcgatagaagtccatataaccagtagtattgaattcaagtttatacaaagtccgaacgaaatatagccctggtcactaattcttactcacgtcattgatatcttggtaaccagctttgcggtaatcacatacgtcattccaaggttacccacggtcttttgattttatcagtgttgttgttgttcttggttgaagtagcatgccgtcgactgaattcagtcacatatactagcgtaagcaatcgtcgttgtagataaaacttcacgcgctccagacatgtgcaaagagttagctggaaggggtttgcaagccatacatctatattgaaaattgaaatcatactatataccatacaggagaggaaagggggtccaggtatgagggaaggtccagccggtccacgggtccacgggtccactccttgaacctttaatgtttgcacgtactccgtacaaatactaggtatccatccatggatggatacggattaccgattacatgctcgggtgctgattggattctgattggatgctggtcgggtgccgaagtcgggcccgacttcgggtcggccccggccttgcgagccaatcagcatgtttactgtgctgctccatggcaattccactcaggtccggaccaggccgatgaaacactctcctgccgacactgaattgcagcctccggactgcttctgccttataatgggtggaatagctttgcgaacacaggatgagtggatctacagtgtcaggtgggaagatattcatctgcctatacaagctggagtcatccgatgttctgatattagagatcgagatatcggagatcggtcgaaagcggactggttcgctaagggcttcaacggtttttcagagcaccttgttccttgtggatgttatagctaggcgggtgcaccaatttccagtatcaccgatcgagctcactaccgttgcgtatgtgctatgtggcattctcacatatggcttctgctggtgtaaacctaaggatatggccacgcctgttatagtccctctatggtgctatcgccaagacatgcagaatgagatagaatacgccaccaatgtgaaatcggaaaatgggtttattttgccggcatgcatgaggaacgatagtgtctctgccttaagtgagctctatcatgagcggaagctccttgacacgctcctggcttctgctacttggctgaatgaagagatggcttgccaggaacacacgctttcgtcgatcaaggttatcagtgatgagtgtagtcgctttgagcttttgcgctgttcatctggctgcgtaagtacaaaccatccagtacgagcttcttaggtggaactttacgttccctaccgaagcagaactgacaagttgacgtactttcactattatttcggttgcttcgaccttcatctactgtttaccaatgacgatgcaagacgtttgcatgtggttaaggtggaaggagatggtcccaacatttttgataggttttgattcccatgacatcttatggcggctattcaaagacaccgtcttggtcatctctatggcggtctacttaatttcgcgggttggcattgtggctctcgttttctcatgcttgagattgcttccggaggggccttgcagggctattcagtgggcgacgtctataccgcattttttaaagacatgcggacatatgccacagagaaacagccatctctttgctatacagactgggatttccagcaaggtaataagggcgtccagcattacgggtatggtgtctgctgaatgaccgtgatacaaataaaaaagactcgtctcaaaatgcggatacaagaaaaacgagctattgtcgcctagtgaatggaaagtatatatgtatggcgagtcatgcaattcaatttgaaagtcccactatttcccatggaagacaataacggccagtatccgcaaccccaagtgcatccacaacactgtatctcaaaccaaggaaattcaccatccatactccgtactccaagcaaggaatagcaagccacgctatctaatgtgctccatcccacgttagttgcagcaaggcgtgcatgcgtacccgacggccgagacgccctacagaatccacgccattcccgtagaaaacgtcatgcccgcggatgagcaaggatctttcctaacaagattccatttacaacgtatattgtgtgtctcgattctgtgcaatcaccgtctcatgttactttcgaagcccggaactcatggacgagaaaggaatagcggtgggcttggcttctttccagtcttgtcatctgatgtacaaccgatgttctcccgttagggaatttaggaattccccctcacagaaatcgggaaaatggtggaattttagattttgtcttttgcggggggaaattaagtggcatttctttcccccgatcgctccttccatattggccgtgctatttacatgtttagacctctctgttacggcaagagcaccccgggctttcagtactttcagtaaggaggcttactttccaagggaaatcccaaccttggaaggttccaaccttggaaggctctcctaactttgctgtcagctgtgataggggcttgcggtaagttttggatttgatcacattcttctctatcttcgtgctgttaatcttgaacattcggtttctaacttcgaagtcaaaatgcctgcaaggggtccattggtggcctttcatcccggttggtaagctatcgttagtgctgatagcaaatcccgagtgttgaccgacattcgaccagagcaaccttgggaagataatgcaatatgcgaggaatttatttccggcctgctaattctatgttgtaccgggatatcatcatagatcgtcgtttgtcgtatataatatactccatacaacacacttcggcaaaacataccgtctctcctggggggaagctcccggagttaatagcctgacgaaacagagccctagcttcctagcttgcttagtcccagagtcggggatatgtgcgatatatgtagcagcctaatgagcttctcccattagtgtgtcgccatgcgcgcctcggagattaatttagtggcttttggcgacaggaggatttttgttttggagctggatggtattattttttttatgtacaacatagctctcgacagttcacatggtataggtgatcgacaagagatatttccgatccgttaatgcacagtgttgtacggagtacagagagtacctaggtaaatcttcttcttttccttttccttttccttttcattgtacaaggtacattaataacatctacctcgtatacaacccattaccctacaaataccaacgttagcggcttagccacaagcccacaaaggtcaaatcagagagctccccaacagcgtcatatttctccatcgccaagatgaaacaaaatgcggggtagtcagagcttctaagatcaccgaggagaaaggaagaaagacaaaataaaataaaaaagagaagagaaaaagagaaacacacattcgaactctaaccttttcaaaagccattgtccttgcgtgatacccatgcagctcccaaacagctcccaaacagcttttaaacatcttttaatcagcttctccgtttctctgcgcatttttgcttattcccaacagaatatccaaatataatatggcgcccccccacaagagattcctattcggtcactccaacactactctgcgcacgagaacaaaggatccgaagaccaggctgttgggtgtatctgactgacgcctcattcctcccttgcatgcaagcacaccggtttttcgattttctccggatcaagctcagccgcgtcctgcctgcgcattttagtctatcttgtatggtaaatagtaaatctgcatatgtgcctcaagtagagcatgcatgctgtgccgtacctacctgatcaacatacgtatatattgtagccgagcgattaccgattacccgattacctaggcaatctagcgtgcatctagttagggcgaggtcgacgataggtgcagtttatctcttaggggctgatcggcgactttggcgccttttttttttttttttttttgaacattccttttcagagtttcccgtcaacacgagcgtgtatgcgagtctggctcccggggaaatgatggcctgtgccaatctgtacggagtacggagtatactatgcaatatacagtagccttggggggttaatctacattcgtcttaattcgtcttactggtttttattccactaatcccaaataatcatatgttttctagattatgttcgattacctcaatggctgagacgggctgcatcactgataggcaatttctccacggctgtgggtcccaccagcacatgctcttgcctcgtacactgtgttcatcatccggatatatcatgagcgcagaactattggtcctcagagtgagatctacctccctccaggcaatctaccatagatctgcagcacgcgactaggcgaagccctacggcgtactccgtgtcccatacttcggtaccaggttgtaagtaaacgagcttgtcgatcacgaaaaagagacagaaagagaaggggaagtaaaaaatgaagccataggtcggctgccatctcccccggcgtaataaggttgaagtgatcagaagatcgccgcagttaagatgacaagtgggttgccacgttcagtccggagtaggcagttacccaaaacgccacagcttctatttacgtttcagctgttttgctttccaatctaatccgctctggcatgtcttcctgtgatcctcaccgcataactttgcgcaaagaccgaagcttcttgcgacactttgagcctactggctaaggcccgggccaaccgaggctatccgacgcacctgatgaggcgagtatctgtttggtctttaagacacatgggttcgccaccggaattctattcgagccaagacgtggatagtaagccaagggtcctctcgccatttgtttctggcctacaacagacttcgagtgtggctgaagggtgccaagtgatcgaccacggcgataaaaagcaaatttaaaatgactgatgtgcgttatacggggagtacggtgaagagaagtaggaagtaatcccttctaaggttcatcagggatgtatcctattagtctatttatcagggatagcatgttatatcgcaaagtctatgagatcgagggaatgtgagagcgatattcccctcatggagtgcaacgtctacaaagtacaatctatacaattttaaaacaagtggagagacgggaacagccccaaccttaaggaaatgggacccgaggacttgtgttcgggatgagctggggtacctgattcgggatggagcaagagcaatccgtgttatcaccgttggccccggatgccgcgtcataaagaccatcccttgcagtcttgctttctattatctcctttgcttctgctaggtttttttctttttttcttttttaattcttctcgtctccaggtttcccatgtatgccatatttctgtgtttaatttcccttttttttatggagacacggatataaatggggaacttccagaccctgggaaattagttctattctccgtttacttcccgcaagatatcgtttttagcgttaagtgaccttaccctctcatcctctcatttggaaagaccggagtacttcggccgctaaccttgggaaattggcttggcttgattgtgagagttactattttcatgtttgatggacaaattcccgagggcccccatgaaatggctttttttcctgcgggcgagaatggtactatgtactccgtactatgtatgatatcatcttctaacacaagcccactacttggcaagacgtggcagcccctttggaagaccctgaaactcaatctgtatacagtataccatacatatagagttgatagttaccccctcaagaaggtatacaacatgactccaaccttggaagaggttggaagtgattaaaagaagccaagagactaggaagtttattttgcaaagatacggtcacggtgtattcaaagtgtattcgataccgtaccgttccatgcccagtccagtctagcatgtcttgttcggaagagcatttggtaaataaccttgaaagctgcccaggtggtaatgtgggggtttctatttttccactaggctatcgcaatttacctttccactttcaggtcttaagagtcaatgaaagattcctaaattacccccagaggtattagacggttttctgatgtggtacactgtttctactgggagagttgagacaatatttgtataacaagatttggcggaatagaaggaaatcaggaaaagattggggaaaaataagggaaagagatcgatgtaggcagtgacattcgcgcgctctctgattggtctattagtatatatggaagatgtcagtacaatgtacctggtaccttcgagtgaaataataattataataataatctccaacagagagaaaataaaatagagaaaataactaaaataactaaaataactaaaataaaaaaaaaaaaaaatataaaaaaaaccaaaaatataaatcaaataatctactcattctacggtcccatccgcgccgtttttcccccccttcaccaaaaggtctcttaacattaaatactctttttaatacctcttttatctttactttatcgtatagcattccccctcattatattatgccctggattcgcaatatcccggctacccatccagcctgaccaggatctaattttcctccatttcaaggtcgtctgcgatcgcatatgcgcttacgttctttcccctctttcccccttcctttggctttccttctcccatcttctgttatttgagctctcagatctttgcatcatggctccaggcagtgggcgcgactttaactgctcatgggagcattgtggaaaggtggggacttcagctcttgatactctttttccgtcctcacattctaacctgttatttggtagtctttcaatcgcaagtcggatctctgtcgccattatcgcatccacaccaatgagcgcccgtatcattgcaccgtaaaggactgcaataagagcttcattcagcggagtgccttgaccgtacactcgaggacccacactggcgaaaagccccatgtttgtgaccatgaaggctgtcagaaggcattctccgacgtaagcgccatttttgaagctcgctatgcgcatttaactgatgatctctcatagtcatcgagtctagctcgccatcgccgaatccacaccgggaagcggccatacatatgccacgagcctacatgcgaacggaggtaagtatttttgggtggaaatatcgaagcactattctaattgtcttgttgaaactgcagtttttgtcgcaagaccaccctcaccaaacaccaacaccgctcccaccctccagggagcttgacccgaccatcctcagaagatgggacctccgagcattcttaccaccaaacacccgtatcagtctcggtcccgactgagcagtacatgctcgcccagcaacctttttacccgcaatcggcgacaccaagtcatgagttttactcgccccaaagtgtgccgatgggcaccgtgccggttcacgaagctgcccctccgatcgtggcccagactgtccccggaacctcgccggtaaacatgccacacgctcaacagccgcagccgcacccgcaacaccacgcgcatccacaacagcagcagcagcagcagcagcagcagcatcaacaatacttacaaatgatgcaacagcgttacgacagtccacgggcgaactacctcccagaacaataccaacatccatcttttcaaggccaccaactgcctcccgaacagccaatgatggtttcataccacccaaactatgcgtataaaccccccggctcccgtctcttgaaccaagcggaggggactgactggggctttctgggagtaggctaagaggagattacacctagatttgtggaccgaatgcgtgtttaatgcccgttacgacttccctgctttctccggctgtgccttttatcttttcttgaattgcaaagcagagatttcgcatctgcttcgttctatggctctatatctctgctccatttctaggtttctgggcgcttttattatggattccccctcgcgatattatgctacttttctatatattgtcattttaaacggaggcaaaggtgtttcccttggcgaatcgtttcttgatacctgaacatgggacgtgtttttgttcttttttctcccaattccccctttcctgttatattccctctgcctgcatcgtctcatttccaagaatttcttttaccaagacggtcattccgatattacccatatatcagcggaagcccaggaatattactgcaatggagcctctactctcattggctccaatcctttctcgtatacatattcctctcagcctcccgtattatctcaccttggcgttatcctactcttaaatgtcacaccatgcctagattggtaaacgatccggaaataaataaattggcttgcatgactcgtgtctgattcattattttcctccatatttttatgcttttactctttctggttgatatggccccatttttcctcggagccttgggagggctcggaaagccaagggccaaggagatgtcttgctaacaaagacgttttcttttcattcgcgctcgttctcgcttgcctgtctagaaagggcttttcatattattaatattatattgcttggaatgacgtttagaggactgtttggggtaattgtttacttatattatctatggatatctctcaaagtattattcactcagacaatcccaatcacaatattggattattcgaatattcgaatatgagaatgttaagatacattcggggttcctttcgccttctcttcccgagtacccgaatgcaacggcaatttgttttccttagacatacatgtcttaagacaaaacctggtggattatccagggatctctaccaggttaatccaccaatacggactgggttcctgttctgcatattgagtaaccatcgatctaaggtagtaggaaatatgccaacgttgcactctggctaaaacactttagtagcaaatcagtctctcagctccgtgggggaccggtgtgcttggttttgttttagtttacatggcctagggccttgtggcaaacagaacattttctctctatttcttttcttttctttttttaccagggatttgcttcgcgaggacttggtgagacacctgcgccttctaaggagtggtgtaggtttgttgttattgtatacgggtgaggtacaaggtacttggggttctttcgcctacacctatctatacgacctagccagtaagaattgagtacggggggatattcctggaagtagttttcgaatatgtaaagactaaaagaaaagaaataataaaaaaagaaataagccagggatgctcaagtgcaagacttcaactgcagcccaaaaccgggtttcctttttggtttgtaaggctatcgtaaggcttattcaaatcggataccatatccgatttgaaattgggagatcttctctggtcattctcttgtgattctatatgttttacttcgtttttgatcctttctctcccattcaaaagtatctacgcggagtctccggacttgcctgccgagcgacactaactttcgacggagatccatacaggggtttgattgaacccaagagtggagggctgggaacctgtggaatatgaaaagggccggtagatcccgcctccagaaagatcaccattatttccaggaaatacaacatacaacatacaacatacggacataacaccctcggaagaccctgtgttgccctttcccgggattccaatgtcgcagtacctgcgcactactacaccagtggacataaaagcctcatacattaggatctcggtgatccggatgcgcaatagtatatccatacccggttcgggctgagactactccgtaggatgttttaatccccccacatgcaagtcaccaactgcgcctaaacccgacggggctatgcgttagccttgaaaacggggctcgatacctccaatcgttgagagaggttcttcgacttgttggtattcatttcgcttcgtctcttgctcatttcgcttctatcggagattttcattagatcctaatctatttttactccgtatgttgtatcttcccctccattccatcattccatcagcaaatcataaggcgtctgccatggggccaatttcgagccgccatgcaatatagcatgctgtactccatactccgtcgacaatgatttcggtgaatacaacatccagacaatcggcgatctcgactggaaaggccttggtcttgcgtggcctccgcttctagtttcaagattggtataaacggggcagttacttccgtggtcgcatcggactacagattccctgggggggatactacgaactaggatctagccgcttgccagctaatgtatcagaatgggtcggggaggaaatcaaaaccaaaacaccgattgcgacggtgattggttcgagatgttgattcgcgtatgttgtagtatatgcaggacatgataaaggaggagtcatgaagatcgggaaatcgggaaagacgcactcgatggaacatggcaaataggagaacaattccagctgattcacgatcggagaatcgggccttgcattctgcgaccgaggctgatatttccggcccccaatgccaagccctgttagtcgcatcggcgttcttggccttatgggcattntagggggccaacgatgtgtcaatcaaacatattggatggacatcagggatagtgaagctgtaggtaattccgaaactgatgttttgggtttatttccgtgctgcaataccggagcagagagagaaataggaaaaagcagaaagaaaaaaaaaaaaaaaaaaaaaaacagaaaacagacaaggatagagctttcccagctgtttccgcttgtgggtttgatcggctatacactcatttccagacttattataatctacagtacagtagcatactcctccgtacataagctccgctgtgagatccctacgggctgctcaagagtcggtgtggggctctttccaacggcgatgtaagggaaccaggatggaccagaagacttccccgtgtgaatggccaaagagataatttgctagaatacccaggtaaaagtgtctggttgtcatgggtgtcccctgtagggtgcatggcgacattagagctttgcctaatgaatgagagacttctgaaacagagaagatgacgtagggcgtggctatgtactatccgagctaggacattacgttattttctggaccaaaactacttagtagacgccgttatatagcttgccggcgttgacgcgcggtggagaaagctttggggaatctaaagggactaaaactggacttgtttcctaaaggggtatgtagtatggagtaagtaatttgagcatatccctgttactccgtactccgtactgacattgctgttactactccgtattatcatagtcaaaagagtctatttccagacctatcgaatgatctacaagagatatacggagtatatatcattcgaatgaggaaggagagttcaggagcttgggcctttcgggagccccggggtacacggcgcagagagtggtgggtgcgggtattgtattggtattgtattggtacgtactggtatgacattgcggagtacgctatggaccgttcccgaaggtccactgggatcccggtacctggagactgtcagtgttttccgttggttatgctatggtaatctggtaaagacattaggtatacgaatactattagacagaatcaccttgtccagacgaaaaggaaatgcttggcatgaatccacaatgtaacctgtcaaacatgatttcttggaaagctcacctcttagctacctaggtagattctggttccatgtggtccccgatgatcgacaagacgtacatagcctacggagtgcatcggtgaagagtaaagtcaaaaaagagaagtccagcaaaagtaaagtggatcggtaatcttttcattatccatcgaatccatcgacgagttgcgatagtccccaacctcaacgcttcgacccattccgttgaaactagtccgatcttcccggagagagacattggaaacaagctttgtggaatggggcagagagcgcgcacatctcagatcctggggctttatccaataatttcgacgagaaatcatttccgaaacaaagctgtatatacccatggagtacaatgaagacctggaaagatgggtcccacctctaaatggcaacttcgaaccgagtgatcggcagaatttcaagagagaagtccagttgtggcttgaatttaggcaaaactgcgtgttgcggctcaggctgatcccaaactttcttttccaagtttctctttttttttttttataaaaaaaaaaaaaatcagaaaaaccaaaaccgttaccaaaacgggaaaacagaaaaaaaaaaagaagttggaacactaaaagattggacccatggaaccaaattaccgctcggctattggcgagcagtggagaaagtagcaaaccttggatgattctcgcccacatggcggatctgaaatgatatcaactccatacattataccaatctagaaaggtcagaaaaccatagttcctgactcaagcaatccacctaggtatgtctagccgtctcgcattatgaaacccaatgtgatcaaagatcccccatacccccacaagtggtcccccacaatgtctggtctagatcggatcgtcttttcttgggagctccatcgatcagcatcttagaatgaggctgtctatgccgaggagatacaacatgcaaagggagattctatttagttctgtcgacggagtagtcagatcgtggtcttcgtttgctttataccgttccttttgcttgtgtcacaaagtggtcttgatacccgataccggagtaatagtacgctgcattgtacatgttaaatggaaacgttatacaaatatcctccgtaaactggaaatacataggtcatttcgatttctacctagacatgactcaaagtccaaatgcaaatcacctggacatcatttctgcattaataatacggacgttatccacctgggcggtattatttacaacgctgtctttctctactagttaactagttaactagttagtattcgcaaaaaaagcctcaggcaccgcaaactacgccgctaatccgcttctggaaattttagacgaaaaaacacctgcggcccctgtcattggcccgttcttgttccatctctccatctgcgctggggaaagcgattatccatatccagtccagacaagttactgtatacaacataacttacagaatactcccgggacactgatgtcgagggtctcacgggtgtacgacactggtaacggctgcgtttataagccttttgtgcgacgctatccgggctggataaagatgccgggtgtcggtgtatgacacagtgcatgttgtaccaggtacctacctaggaaaaaccatcctggcaaatacgccagtcttggacttgcaatatcggcgaatgctgaccggaggtttctctggactatgcgggaacaggaaatgggggcggcatgctatggcttgaccggggtattggggctgtgtactatgtccttcctttctgggctctcttctctttctctctccgtcggaaatcgggatgtcggcgcgatagacacatggcgaatggtattttgaccgaggttggatgggaggggattgggctgctgcgatattgcccacccacccccggctgatgactttttggcttggggctcatgggctggtagttgcgtgatatcggtacttcatgcaggtacgtatgaaatgacgacctcgtgttccgtgatgttatggttattcgatcagtgagggaaggcacacacagctttgaagtatgcacatatacaccacaacgctaggtggcagtagattgggcgtcgaaaacggctaggtttgacgccattcgaagtagtatgctcactcagttgctcagagagcgctctctaagcactcatggttgcccagggatcagcttacccttcacttagggtactgggggtaggcaatcagagacgttattgttgggatgatcctatcctccgtggatgcctgttttccccggcagactgagcttgcttgttatgcggtctctataaaacggccttcttttggtttgaacagcagaattttcttctttctctatctgccagtccatggtagctgtagcctccaacagctataacgtgattccttctacgttgtccgactgtagccactaattgcccaaaaaaaaaatagaagggtccttttgttaggtgctgaaccaccccacgccttcattctagtatttaagagcctctgcccccggttatttcgggcacttcacccaagacttgcatgtattccactaatgtctaattcctaggtctcttttggatcttagttaccgtcttctcttcccttctgctcctgtggcatcattcctcttcttctccagattatttcgttttctcactacctcattcctactccagttgacgccgtacttattatcttagcaccactgcgagtgggaaaaagcaggcttatggtccccagtgttatcggcggcgtcgtcaaaacagcctgagaacggtatcgagtagaaagcgtagacacgatcatcatgtccaacagcccatttattgcttgtagagaacaataactttagagttgcatctcatctgctttgactcagataatatttgtcgagacattcatataacgatctttactaatagtgattctggtggattcagatctggaaatgctccgctaaagcaaatgggttccctgcatccgttgtagaatagggtaacaaatagtaaatacagtagccctacatagcaaatatagcagttggcaccatgcgcatagacagttgtgacttttggggcagtgctacatccatggatatggagcactatatacgaaagcacagatgatatacatcaggcaacccaacatcagcccggaataggaatatgtccgtgagatatcttactatctccactataccaactccaaaatcccaaccaacccaactcgaacttaccaactcgtcagcccgcgctcacgatcaaacccagcccgcagctgtttcccaggcttgagcaacttgccctgcaagacagtataccgaataatattctcacactcctccggccgcacacgtgccaaccagatgccctgcgcagcaccctcatccacaaccccttccgcatccgcaggatcatcgcgcttgtaccaatcaaagtcccggcggcggtacacaatcacattcgcagagtatttgtgtccaccaacatggctaatgaaatagatacccacaccgccaggccgctggtcgtccatgtcacggtacagaccgagcggacgaaggtggcgctcgaactcgcggcggagtaagggtgcggattgcccacagcgcgcgtcgcgtgtgcgctgcgagcagaggaggattactgctgcgtgcgggcaggggtgggacttgagggatgtggtgattgatgttgtggatgggtgtgggaggtcttgtgtttgtgtggagtcttggtcttgggttgcctctgttggtttctccgggtggggtgggattgcacctagtggtgtggttgttgtcaaggaccggtttacgaagttctcgatcagatctgggactagctgtggcgtgacttgctcgacgacggtgaagctcggcagcagcaggacgtttgttggttgcttgcctgcgtcggccatatggtattcgtccgggacgggcatgtttgacgctgacagcttgagtcgctgtaagaaggttgttgttagcttctctgtgcgtgcattggttggcaggtatagagggatggtggtggatattgtcataccccgttgctcggttccagtcctcctttctcaatggcttccatgacgctcccttgctcgtccgccacgtctcgcacccagtctgactttcctgttgcgacgagcatgtgcgtcgcccatccgttgacttggccatatagttcgtcttggtgatcgacatcgaactttgcggggtatttaattgtgcatgtggcacagtcgtgcaagcagtcttcgccgtctactgctggatcgacgtttttgaacagcttatcgcttgacgagattgtttgaaacccctctgcggcgagggcgttgtcgcccacagcatcggtggtgaggtcggttctggaggaggcggcagagacgttggaggagctgaaaagggaggaagcccctcggcgaaagagatgcattgttacagtatatggatatattcttcaacagagcgagaaaggagaaaagtctgccagtttggcctcttattctttatgacgcgtcgtaaaatgataaattgatcttatcaatcattttgcaggttcgccaagccctcggaatggtttccgcctaagtccaccccactgaccaggttgaggtaaagccctacagggattctaatgttggcgcaattggtgcccaaatggcgttgctctataagtaatatacagggtatggaatttaacattatcactgtctacgtccagcgtagtcaattgtatacggcaaatctgtcggatctcgtggctgcgtcaagcgaatgacactccctcccgaactgccagattggcccgacgccacgcgtcgtagagatctcatagaaggtgtgcggaaaggacttcgcgccgcgtagtatccactgccggttgacagtcccgaggcggggctctgcattgcgggcgcagtgtcatacccggactgggtctcccaggtagacgcattcgatggacgaaggctgtcactccgcatggaccctagagtcccgtcgtaaccgtaagtccccacagtatctgtttctccctcttcgtccgagggcccgatgccggattcgctataggctcgtcggtagcttgcactgtcgcgaatttcgtccaggatcggtggtgcaatagatgtcatccctctcaagatctccgcgaacagatgcatcaggtcgcgaaattccgcctcgtgtaaatggcgtgacgagaatcgggctcgttcgtacagcgcaaggaaatccacaccgagttctggcggatagatagccccaagggacgtcagatggcggatatattctctcaggcccattgacgcaggacgctgcaatacttccaccacgcgcgtatccggaagagactgtgtcgcaaggtcgcctgacggatcgaagtggtacgtggccgcaggtgataatgaatcagcaggggcaagggagacagccttagcttcaatcaagctgggaagctcttgtatgaccgtgcgatatggtaggttcggtaaatccggcgaatcaggtgaagaccagccggggtgctcgacatggccccatgggggtcgttcggggtcaatgagaagtggtctgtatttctggaagctgtccttgtcggtagagatatcacgcgggcgggcttgatacgcgatgaccgcactgcggaccaggccttccttcactagtcgcctaacgctcttgttcacatcttccttttccacggggatccaggctttgggtatgccggtgagtgcactccggttcgtgtagatgcgtgtcgcgtaaatgagaactgcaattataaaagttatgacatatgcgccggtgatgaaaaagacgttggtgagtcggttcgtctcgtagcattggtagatagcgtccgctggtgtgaggatgatgaggcagaagaggatgagggcaaagaagaagaacccggttgtgttgagaaagcgctcaagtctgactgccatggcttcccgtgtgccaactgcatgacacttgggtgagatttagcagatctcagccatgaagcggagcgagtctgacggggaacaacaactgcgataccgataaggatacgatttaaagttgaacacgtgatccgcgttgcataggcactttccccgttcggtggattttcaacaaacttccccagtgctaacctcggggggaattcctttcttttcacatgcagctgactgtcgcatatctctctcattgagacatcaagcaacaacatctccggcctcagccagcttcaattggaagccttatcgcataacccctaactccgatatcaagaaaagtgcgaagtcaacaaactcactggagcaacaagccatggaccaggccaagcccgctagtgagcagcaaatgttgcacatcctggtgacaggtgccaacaggtacgaaactctcaatacaaccgtctagctcaattccctatactaacttagaccatccacagcggccttgggttctctatctgctgccgccttgccgacgagttcctctcctctcacccagaatccgagtccctcaccataatattcacaactcggagtgcacgcaaagcccaagacacaatccgcagactagaagcacacctccaatcgacctccccgtccgcatccgccgcggcacgtgtgcacttcgtctccgagaccgtcgaccttggggatctccgctcggtgcgcgcactttctcgcaaactagtccacaccctcccccgactcgactcaattgtcctcaacgcggggctgggcggctggtctggcatcagctggatcagggccatttgggacgtatgcacagatctcctccacgcggtgacctggccagcctacaagctcgcaccggcgggcgtgttgacagacaagcaaacaaagacagaagaagagcctgcactcggagcggtcttttgcgcgaacgtcttcggtcactatatgctggcgcacaacgtggctccgctgctgaagcgggcgcgcacgaatgggcccggccgtgtggtctgggtttccagtatcgaggcgacttggaagttcttcgacatcgacgatatccagggcctccgcactgatgcgccatatgagtcttctaaggctctcactgacctcctcgcgctgacctccaatctgccgtgcacggccccctgggcgattgatagcttcttgcagtccgagactgagcttgacacccatgctatccacacagatgcccccgatgtgaacccgctcatgtatgtctctcaccctggtatctgcgccacatccatcgtcccgcttattcttccccttacatgggcgatgattgctattttctggaccgcgagaatgctgggctcgccctggcatccgttgtctacttacctcggcgcttgtgctcctgtgttcctggcgctcgcatcgcaggcagacctagaagctgcggaagagccttaccgccgggccggtggtggtcgagcgaaatggggttcgtcttgcggacgtcttggaaatgaaagtgcggtttctactgaggtcgacggctggggccatggtggtgttgtcggcacgcctgttgttgaggcagaccggctccgacgtcgtaagcgtggcgcggaggatcttaccaaggaaaacagggaacagttcgaggaacttggacgccagtgctggaagcagatggaagaattgagacttcaatgggatgaaatcctggaccaagctgaggctcgttcctagggacggtttgaaggcaaagaaccgcttcgtcaaatactcacagaactatgcttatcttaagtcttttccttgattttctgctacttgacctattcgaagcagagcagcttcaatgactgtatgtccaattctgtatgtaatactatgctgtatgatacttctaccaagaatacctgaaaatatgaaacatccgaagaatcgtgttgaagaccaattaagcttgtatctttttttttcttttcgaatttcgcctcccattatttacatcaacagaaccagccccacgcccatgttctcattaaaacggatatggcatgatttccttgcccaccaattgccagaagaccagcagataaaaaaattgaaagaaaagaagcttggaacgaaaacaggtggccaaacgcaagggagcggggatgtagtgacgaaaccctcaaaatgtagcactaaaacggggataatttggaggataaaagtagaaagacaagactaaaaggggttatttcttgcaaaacagccgaaatcgcacgttttcaccatctaggtttctgagtgcattgatcggacgaaaggaagttgagagggcgataaaccgtcactagaagaaaaggcaagccggcaacagaagagaagacaacgcagtaaacgactccggttctatgcatcaaggaggcggactggagggtggtatcggcacgagagttgaagggaggtatttcaaaaggcatagcgacgtgaaggaagagggggaagtagagaaggagattacatgatgatcgcgggaactgtataaactgattagtataggtttatgaaagatcacgaaggaaccaggacgtaccatcaatgttctgcttgatgctcttgtggggcagaatcgagccaccgttgacatacacctcgtcggcaatggtaacgtcgtctccgagaactgtgacgttctccaaacgcgcccagcggccaacagagctgttccagccaacaatggtggacttgatccaagcgtggtccttgaccttgcagttctccatcacgacgcagcgctgaagacggacaccatcgccaatgacgacgttgggaccaataaccacgttaggaccgatacggcagttcttgccgatcttggcggaggggtcaaccatgacatttccgccgtgcacgtagggctctgagtgaggggcaagcatcttggggttgcgcttggccagggaagtcaggtacaggcaagtaccggtgaggaaatctttgggctgaccgacgtccatccagaagccctcgagatcgaaggagtggagctggccctccttacagatagcggggaaggtctcctgctcaatggaggtcggacggaggtcgatgcgcttgagaacactggggttcagaatgtagataccggcgttgatgcggttgccaacgaattcgacgggtttctcgacgaagcggtcgatgcgggaggcatggttgggcttgtgcacgacgacaccgtacttggagggctcgtccaccttggtgacgacaatggtaccctcatcgccgtgattcttgtggaagtcggcgagctgcttgaaggggtagtcgcaaatcacatccgagttgagcacaaagaaaggcgagtcatccttgcccaggatctcctctgccagcttgagcggaccagccgtgcccagcggttcggactcgacggagaactcaatattgactccgtattgctcctcgtacttttttagagctgcaaccatcacatccgggcggtagttgacggcaagaacgatatcagtaacacccgcagcggccaagctctcaacctggtgcaagatcatgggccggtttccgaactccaccaaaggcttgggaagggtgagggtctagaacaattgagtattagcagctggtcaagtagagaataatgcataaaatatataatagggatatttaccagaggacgcagacgagttccgaaccctccaacaagaatgagagctgtagagagaggggttagcggggggggagaagaagaaggcattgactatacaacatacccttcatgatgaattgaaattgaaaggaatagaaaaaaattagaaaaaaaggattaggaatagtaaggagaatcaaaaggagagaaagactctctgttatttagggaacacctggccgttgatggatttattttcgtccaagtgggggcacgtgagtggcggtgattggaggggccgtctgtttgcgggaaaaagggggctctcatatacttcaccttcggtgtttcagctgttggagctgttttggggatggaatttatatttatttttatatttttatatgaacgaatggatggatgtatcaagtggtattcaattgtacattctatcacatgaaattccaagtactcaacatccctgacgcgttcatgaagtctttggtctcctgaggttctcactagctcagccatccccggccaatatgtccaatgctattgcatgttttcaccggggcaatgcagatggcacccgcgaaactaaacctccaatttcctatggtcatgagatgtcgcccctgaaatttaagtcatgggaatttgtggttgggtgattattccccgtctcccatcttagatacgatcattaatttccaaggttggcacttagtatggagtacaaccttggaagatacaatatttactaagttaataatttaacccatggactatgtaaagcatggaaacaggaaacaataaattaactactgcgtatccggaggcagtccacgtggatgcgacattccaaccgaattcgtcacaaaccggagcatccaatttcgtactcggcgaaccttaagaaccggctgatcatcgtgggagctaccttcttcgattctgccctggtaaaacccaactgcatccgtcacatccaccggttgtcgatgcaacagctcgaccgtagtcatccctcggcgcagactctgtccatacacccgatcttggaatgtactgagcccgacagttcggagcaacacaatgtcgcggggccgaattgacgccagcgatcgacgtaggcgatccgcttcgttgttcttggcagcggtcggcttctctggcttgagccaaaaattgactgcaaacccagcccttgtctcgtctccaacgacgagctcgatgaggtccaattcagttttccattgacgcgttactatccgacgtgggggatgaactgccaacacccccacgattatattcaccgtcatcgtttgcggtgcaatggattggatgtacctggccgtgggaaggtcttgcaaattgctgagggatccagggatatgcaggatgcgaggtgaccttgtggtgtctggttgtccaacctcgtaaagctagccaacatgctgtcctcgcccagactgctgtcctgcgtggaatctgttacatacacatctgagccagctacctcggaggtttcatggatagcgaaagaatggtcgtagaattgaagaatcgaatcgtccgattgttcttgtgtcgcatctgtcgcatctaccgcaatagccagttgatgcgagatgaaaaaggctggatcctcatagccttgaaaagagtcataattgtcacctagcttatcgactgatgaccgcaacactctccatcttacaggtggttgctccagggatagctgttgttctgggctgctcggattctcctgaaagggaggcatgggcttgttgagaagcttatctgtgtcccagttcagattcgctgacaacggagcccctaccaagaagatattttttcgagacatatcggtctgcattagagggcagaatatgcaggttaaggggagctcttatccttgagaaagagcgtaggccggaagatcccccgaggccattgagcctgtcacaaggtcatttcaatatcgtctggaaagcgaaagaagttcaaaatgcccgtagatgtcaagtcgttgaaattcgtaaagaccggggagcgaaccatgggcagctttctgtcgacaccacaggtgtagctgcccctttcagctactatcacctaccctgttattaccgactgctccgaatcacccataaataactaagccatacgacgttttccattaaatgtcctattcattctttcgtcagttgatgagagctgacgacactataaatgcccccggttataccgtgcacgtgccatctagtatcacgtgatgactctacggtcgcccattcagacctaagtggctgtcgccattcgccgcatcaaagcggagcacactgtcgccttcatctctatcttcattcttgcgtcagcgatgtcagtctcttcaactcggaattaactgattgaatttcgcttttcggctgtaaattcgactaagaggagcacacgtccatcctcgcacccggccgagtgccgctgtatattggagtcatggccttccaagtcccgatccccatgcctgtgagtatcacttcgcaatacctcgtccagatctcacgactgacacaagcaacctgctgctagaatgtcgctgccgtgacatcggatctctggccttcaatgtataacgccctggccgttccctggaaacagaccgggcgaacgacgacgaccaatgtcagcgagtctctccagcgcagtactagccgacaaggacaggagacggtatggcataacctatcatccatttgatgccactccatgctgatgaagacagatcactcaacgcgcgaccttgcctgaatatttggaaggtgtttccatcgaagccctacgagcggacatcgtcagccggccgtcgcaacaaacatggtcgtcattgctgaaccgaagtatgttttgggcttgagaaaactggtttggtgaattattctaaccgtcgataacagacaatgtacttcgggctacctcatcttttaccccgatccgccatgctatccccgctgcccgttcatactcaaccctaaccccattccgccttaactccctacgcactcccccgaaggtcagtggtctgtcgaaatcacaacagcaacggttcttgtttggaggctcctggcatcatgtactagctcagaaggagaagatcgccaacaagagtccgaacaacgcagatgctcaaaatgctctctattcggctcttctgcgtgccaagatgccgggcatagttatcgaacgacaccggagtggctactttgcaggcgatctgacaactgaagcattggtccaacaggcccagtcaagcgtcggtggcgccgacgctggagctggcgcttttgccgggccaaaccacaatctgagccctgaacagctccaggcagttggccaagcggtcgctgcccgggctactggcagtcaaatcggaatgggaaaacaaaacggtaccggtgctaaggacgctccactttacgtcgtggtcgacgagtctctcggaagcacagtgttccgctgggtcaaattcttgctcattttcggatttttcacttacatctctctggtcacggtcactatcttggttgaaaccactggcgttctgaagaacgttcgaggtgcgcaggacaaagaagctcagcccgaacagcaaaccgctcgcttcagtgatgtgcatggctgtgacgaggccaaagatgagctgcaggagctggtggaattccttctcaacccagatcggttctcttccctaggcggtaagctgcccaagggtgttctcttggttggtcctcccggtactggtaagaccttgcttgcgcgtgctgttgctggcgaagcgggtgtcccattcttctacatgtctggatctgaattcgatgaggtatacgtcggtgttggtgccaagcgtgttcgtgatttgttcgctcaggcccgtggcaaggcaccggctatcattttcatcgatgaactggatgcgataggtggaaagcgaaacgagcgtgacgctgcttatgtcaagcagacactcaaccagttgctcacggaactcgacggattctcccagactaccggtgtcatcatcattgctgccaccaattaccctcaactcctggacaaggccctcactcgacccggtcggttcgaccgtagggttgttgttgacctgcctgatgttcgtggcagaatggacatcttgagacatcacatgaaggagatccagttcggtcctgatgttgacgttggagtcattgcacggggcactcccggcttctccggtgctgacttagagaacttagtcaaccaggctgcagtccatgccagccgtgaccgcaaggcttttgttggcccgctcgactttgattgggccaaggataagatcatgatgggcgccgaggctcgcagtcgcatcattcaagacaaggacaagctcctgactgcgtatcacgaggctggtcatgcccttgttgcacacttctctccttcctccactccgctatacaagatcactattgttccccgtggtatggcccttggtatcactcacttcctgccggaaatggatactgtttcaaggaactataccgaatacttggcagacatcgccgtctccatgggtggcaaggctgctgaagagctagttttcggccacgacaatgtcactagtggtatctcagctgtaagtcttgctggttgtaatcttgttgttttttccaacactaacggtctctataggatatccaaagtgccaccgagacggccttcacgttgatcacccggttcggatattccaagaaactcggcaacgtcgacctgtctacaaactacgacagcctatcatcggagactaagcaagagatcgaggctgaagtgcgccggcttgtagaggaggcccgtgaccgagcgaccaacatcctgaccgaaaagcgcaacgaacttgagcttttgacgaaggcgctcatcgaatacgagacgctcacaaaggaggagatggagcaggtgttgaagggcgagaagctcaacaagcttttgtccgcccctagtgcgccgctgaagcttcccagtgccttgcagtcgaccaatctcaacccgtctgcggcaggaagagcacccacggccaatgaataagtcatctcctcacacactctgtaatctcctcttttcaatttccccatatcttattccttgctctacaaatcactcccccccctacggtgtttttcgtctccatcgtgcatcccctaaccattcgggcgtttattgaaaataccatatttccttggttctcttttctacatcatgtctcagtcagatcctcgttgactctggttttcgactcgcttttctgcgtgcgtaattaccattgaagcttgaattgatctctgtacatattccctgtattttgtatgctgtacgctgtatgctgtacgaatacgtcacaatctacaatctactagtaaattggcaatatacctaagtaggtaagtaggtaagtaggtaacctggaggcaattgaccttgaaacccccgattctctctcatccccacatctccaaatatagtaacaagccaaaccctaaaatcccaagtctgggaccgtggggatcatgacttcaccggcgcatcactgcccaggcactgaaatcaccttgatttgaagcttctccactggcatgatgtcatggggttttggttcggagaattatctgatgaactggttgacggtgttgacatacgatgatattacgatagagtttgatcttcagtgtttgtttagattcttctgtagagatgatatattttgaattttttttttcttcatttcctcacaaacgggctgtatatacagtgccaagtcgagctcgtcccagagggaaactagccaacggcaaaatggagagaaaaaaaaaaaaaggcaaaccccagctcatcttctggaacaaacgactcccgtcataacggtcatgatgaagggggacatgggcgtggcgaacgcctattaggacggactttctagtcggaaattctctaaatatgtataaatgggaaaactcgaggttgtccaaatgttcccccctccaccccggaaaagaaaaatgaaacaatccgagtatctccaagagaggatatgtgcgatatccggttgatatgatcttcatgtaaccctcctctcaaatctctcttcttgcgcgtgtatgtatcgtgcatggtgtgagatgcacaacctgggccgcggggttgatgacggtattggggtcatctcaaaggaatatgtataaaagttgtttattcgtcgtcatggtgttcctctctgtcctcgtcggccatccagccgcgcgacatctccacggccttggaccactttttatacattcgggcgctggctttgacggacatcgcgggggtgaatgaggctcggttggcgcggttcatatgtttaagttcggagaaatccttccagatgtcgatggcgaagccggcggcgatggcggcgccgagggcagtggtttcgtgcattgagggtcgttcgacggggatttgaatgatatcggcttgggtctgaaacgagaataacagttagtggtgtggtctggggattgaatttcaacagagaaactttgaaacgcacctgcatgcaaacgtcggagttactcatgccgccgtccacagccagttctgtcaggcccttgccgctgtccattgccatggcgtcaaggatagctttcgtttggaagcaggccgcttccatggttgcacgggcaatgtgtcctttctgtgtgtgggcggtgattccccctggtgaacgttagcgatcattcgagacgaggcaccgtgttcgagacttacaaatagttccctgggcatcatcgatccagtagggagcaaagagaccactgaacgcagtgacgaaaatgcagcctccgctatccggtacactggcggccaaatcgctgaccttccgcgagtcgcggaaaaagccaaggttattcattaggaaagagacaccactgcccgccacggccacactgccttccagtgcgtagacagccttacggtttcgccctaattggaaaccaacggtgcccaagagaccatgtttcgagataaccggcttctcacccacgttgtaaagaaggaagcatccggtgccataagtgttcttcgccattcccggagaaaaggcgcagtggccgaccaaggctgaagcttggtcacccagacagctggtaatgggaacaccctccagcggcccttcggccattttaccgaaaccctcgggatcagccgagggaagaatctcaggcagacggatcttgttccggtcaatatcaaagaacttcaagaggcgatcgtcgtattggagggtttcgaggttcatgaacatcgttcgtgaggcattggtcacatcggtaaccagacgcttgttctgaggaccaccgttgaggttgtagatgagccagctatcgacggttccaaatgcagcccgaccatcatcataggccgacttgacatcgggcagatggtcgagcatccatcgtagcgtgacggatgaggggtatgtggagaggggtagaccgcaaatattacggagttcatcggcgccgggcttttcctttagttcccgtaccaggttgacggtacgagtatcggtccacgtgattgcgttgtgcaggggctcgccggtctcccagtcccagaccaaggcggtttctctttgactggtgataccaatggcttcgatgtcggatgtggtgtagccgagggcaaggaaggatttcatagcctcttcgatacagatatagaccgactcgaccaattcgtaagggtcctgttcgtgccatctgcgggggtgcggggcacgttaataccgagtcggaagggggaggggtggcagggattgcaagggggtctgaacacctaccctggatgttcatgaatctgctggaattcagtttggtatttggcgataggaacaccggtgcagtcgaaaatgatgaatcgtgtactcgttgtaccctggtcaatggtaccaatgaatcgactcttcatttcatcctcgggctcatcctgtagcaaggaaacatctccatcgtctctttgttttggacgatagttgagattcagttgctcccgttgtttttcctccacatgctggtgcacatgttgttcggggagctcgaaatcctgggcgggttcggaatctccatcaacgctctcatagtccaattcgaaagggttccgcatcttccaaaagtgtgaaaaagacgaaagaaaagaaaaaagagatattaagagagggagaccgattttactgtccaagatttaaagagggggggaatgacggagagaactacgaggtggcggtgttgggatacggggaccagctcccgcagaaaagtggagcgtgacgtatcagagaagtgaccaaaggtataaaagtaggtggtcacttcaatgtgtataaaatagaaaaacggtgaaaaggtgaaaagtggtaaggtggtaaggtggtaaggtgaaattgttcgaatagagagtgtgtgtcggagtcgtatgtatagagaatcgaggataagagtataagagtataagaggataggagtatagtcgagtaaaagaaccgggagaaaacaagaaaacaagaatcacggaatagaaccagggcctctcctctttatccaaaggggtggactgggccaaggtggggggaaaaagaaaatgagaaatccggttcggatttttttctgatcagaagacctcgtcacctcccccactatttgctctttataggagatattatcttattatcttattttcttattatctacctaggtatatgatctattacagctatttctagggtatggttgttaccttggatatcttcatactattcacacctttccataatacttcctatatcttatactatcttatatataccatacctaatacctaataccctatttatccttatataaaccatctccctctcaaccccgtctctccaagcctgggcactccacaagccccgtcgatcgtacacatgacacggtccatttttcccctgcggtccctttagtcgttctagaaccccctttttttattagtcgacattctttgcagattagttggattcctattcatggagaaaatcccatggaagaattattgatttatatagcctataggggaaagaagtataaaaaaagaaataaaaggaaaaaaatggggattccccattcctggagaacgggctctagtcgaggccaagaacattcgagcacatcaacccctcctccaatggaactacctatgatcttgactccctacttcccgggtctcattctgattgatcaagatccttgttggcacattggcatttatgttggtgaatagttaaatccctactccctccctacctaggtacctacaacacataaacccccggatgacgtctccagtaccaggttcattcctggtccggtcttattaaccggcttaattgccctattagaggccattatctcaaggcgtggagagggtcttgtcaaacctgccagggacacagacggaaaaaggaacaaaaataagcaaaaaagaaaagaaaaaggccgatctaggtggattccagcatgtttcctgttatcggccgttactatgtatactccgtacctcgcatgcaggtctcgcttgaccttccctgggatccgttttcaagcatcgaaattcaatgcgacttgcataaaaggaacaatgtaccctcttttttcccccataatattcactatttcagctagttccttccatagtttagatctctagtcgatattttcggcaccccgtgacacctctgtgatcgacccgccctttataattccccctttggatcaactccgatctgcggcaacccgtgtgaccacctgggcaagatgccgattaccaattgcgccccttaactccgtatacagccctggaggtctatgtatggtttatagctataccttgggtacctaatcttgcagctctcaatcagatttaagcgcgtagctttttacattccgtgtttcgcgcccaaaaaaaaaagaaaaagaaaaaaagaaaaaaagaaaaaaaaagggaaagaaaaagaggaataataacaatgcgggaggcatacatccatggatatacccttgtacatccgtagcgcttatatctactcccattcaatactcaattggtaaatttttctcactcaaaaaaaaacattgttacttggacgagaacacttttggtgtctccaactattgacacttcaattaaacaaaggaaaatttcagtggccgccctagtgcgttctgcgtatattctacaggaaatcacgggtaatgcaaacatcgagattagtctcggggggttgacgccgccttgtcaaaaggcaaaatttactcggaatcctcgatctcgctgcgacggcgagcctcagcctcctccttctccttcttctgcaggaagatcagagcgttgatcttgtccttgatgctgtgctcggaggtgatggtctgctggatctgctcacggccgatcagggtagccacgatggaggcaccgacgacgaaggtcagcacgaaacggtacatgccgtaccagtgaggagcgcggccagcggcagcagcacgggcatcgttgtagtacaggaaggtgaaagcgaggaactggctgatcagagcgtactcgacggggaacatcagagtaggccaggccacagcgggggcgatcacaccggcggcgtagcggcggtaaccgaacttgccgccgtagccagcccactcaagaccccagtggatggcaccgaggaaagaaaggatctaaccgtaaacggcgattagcaaacccggtaactgattactcaaagagactagactcgggactactcacaacggcaccgtagccgatctggatgggctcgagcatgtgcagcatcagctcagcactctggccggagaaaatcagaccatcaccgagagaggcggcgcggttgatctcgtaggagaggaagacggtctgcatagaggtggccaggtaggggacgacaccagccataccgaggtacatggcctccttggggactccgctcaggctgaaagtctccttgataactttctatattggcgatgggcagttagcatatgcagagcctcacaagtgaatggaaatacgtaccgcctcggacttcatacccgccataacatcaatatcatcctcatcgtgctaccgtaccggcaattagccattgagtgtctttgcgcaaatcacaatccatgtgccatctcttaccttggccgaagaagacgagtagcgcacaagagcggtggtaacgggcttgtgagcggcgagcgcgaagctcggcgaggtggagggacggagcagagtgcgggccgacgaggtcatctgagccttgcagatctggttgcccagagcggagcgagccacggaggcattggagctcgagaaagcgcggagcgcagagcgggcagcggcgttgcggtacatggcgggggagtatacagcttttcgttgtcgtcgggttagcaaatcggaagagaaaagcctcgggtatggccggacaggagggtcaactcacccaattgaccttgaaaaagctggacagaagtagaagagtggagattaagggtatacacccggaaaatgacttgagcacaaagtcgacggcgtgggctttccgggagggaacaaataagaatatccagaaatgaagtgaccgagtgatgaggtgtggtctgctttcgggcggaccgcagcgacccgaactgcaaattgtagctcgatgcaggtattttggcctcaggctgtgattcatgttgcctcaggcatcagaacttcagtttgggggctgctgccctaaccaagttggctacgtcactcctggggtaaacaactgtgtaccagtacagtacaggatattgcagggggatggttcactgtgcattgcctcgtgcttaaacggccttgataacgaaaacaaccagaatacttaccactggcccccaactactcacgtagtgccaagtgtattgtagcgagagtacgctgtacctttcaaatactttggtggtaggtgggaatggtacccgccctggcgtatgaagctgtaccccgttcgtaccgagtacctcccatcatacaacttgcgtaacagatatcacctctcttgatccacgcaatcagggtcattaacttcaatgttgggcctgaatacccaacaccattctgtcccaatttagcgcttgtgatttcctcactcccttgatctaacacctagtcatcttaaccgttttccgctttacttggaggggaaaagttccacctcggtatcgcgcgctcccagcccgctcagttggatggcttggatgtcccctattacccagggttcttgaaagcagcccttacactgcgtaagaacccatttaatgaagaaattctttactttcacttggattgccgctgacttgccaactgctttcaattacagactatcaccaaatctcaacccaccgacatccaccctggccatagagcccaaccaccaggcccggtcaacggctgcacgccgccacgatgctggagggagtggttgctaacctccttaaccggttcctgggaatctacgtcaaaaatttcgatgcgacccagctcaacatcggaatctggtcgggcgacgtcaagctacggaatcttgaactgcgccgcgaagcgctcgaccagctacgcctccctctcaacgtcgtcgaaggccacctcggagagcttacactatccatcccatggtcaaatttacgaggcaaaccggtgaaagtcgacattgaagatgtcttcctgctcgcggcacccagagaagatgcggattacgatccggaggaggaggaaaggagagcgaatgtgctgaagatggaacgaatcgaaagcgctgagattctacgcgagcgcaacgcggaaggcatgagtcaagaggaacagcgccggaaccaaagcttcacgcagagcatgatcacggccgtggtggacaacctacagatttctatcaagaatgtgcatttccgctacgaagactctattgcatcacctgggcatccgtttgctgtcggcgtgacactcaaggaattgagtgccgtcagcacagacggggaatggaatcccactttcattcaatccgactccagtgtcacacataaactggccgtcctcggtgctctctcggcttattggaatacagatgccacactgctcggaaccggacgaggatctgatatcggcgcagaagcccagggaatcggccgtgctgagctgatggaaaaactgagaactgcgattgacgccgacgaaggaaaccaattcatgctgcgccccgtcagtggtcgtgctgggctggagatggacaagtcaggcacatatgatcgacccgcaatcaaagcacggttgctcttcgatgagcttggcttcgttcttgatgacaaacagtatcgcgacgcgttgatgctggtggatctattccactatttcattcgccatcaggaatataagaaaatgcagcccaaggcctcaccaaaggaagacccccgggcatggatgaggtttgcaggagaggccgttcttagcaagatccacgaacgcaacagacgctggacctgggactatatcaaggagcgcagagatgatcgcatcgcgtacattgccttgttcaagaaaacgaagaaggaagaagccctcacgcccgaagaaaccaaggagatacagagactggaagcaaaactaagctacgaggatatccggttctggcgctcacttgcaaggaaccagctacgaaaggaaaatgtcggggtaaagaagcccgcagaacaacagtcatggtccgcctggctctggggctccaagaaagaggaatccgaggagaccgccatgaccgaagaacagcgacaggagctgtataacgccatcgactgggacgaaaagaaagccatcgcagagagcgtggatgtgccccgggaatgggttaaactccaggtcaactggagtcttcgggctggtagcttcactctcatccaggaccctcatggatccgccaatgaggtcatgaaactagtgtttgacaatttccgagctaaggcacttcaacgccctgattcctatctccttgatcttgaccttggaggtctgaagatgtatgatggcaccacttctgggactctttatccccagatcgtcaaggtcaaggattctcctcctgaacctagcaaggtccaagagctaggcgaggatgatgatgaccttgcctcccaaaccagcgcagacgatcttcaggatgaggatagtttgttccatctgcagctggagaagaacccgctcgaaagcgatgcagatacagcggtgaaggtcaagttgaagagtattgaggtcatttacaaccctcgattcctcgtgggaatcgtccagttctttgagccacccgagcgacacatggagtcgattggtgctctcttggacaccgcaggtgccactgttgaaggattgcggcagcaaacccgagccggtcttgagtttgccttgcaagagcacaaaaaggttgatgcgcaattcgatatccacgcgcccttgattattgtcccagaaagtatcacacaaccaagttcactttgcttgattgtcgatgccggtcatgccagtgtcaacagcgagctggtcgatcgccaagcgatgcgagatcttcagtccaagcagaaacgacagtatgaggaggaagattacaagcaactagagcatctgctgtacgatcgcttcctcatcaaactggactccactcaggtcctcatcggacctggcgttgaagcaaccaaagcacagctcaacaccaatgtcgagtctaggaatttccacatcatcgaccggatcaatgttgactttgccctggagatgtgtatcgtaccgaacgtgacacagcttaccagaacacgcatctctggtcatctgccagagcttcacgcgtcaatgtcagacaccaaatacaaggggctgatgaaattgattgatattgcaatcccgcaattcgacgcggaaaagtctgcctccgatccagctgccaaagcagcagccaaagaagaagcagccatagccacaagagccagatcagcatccttccaaccaccagtccagcgtgaccttcccgtggttgacgacgatgaggaggacgttgaagtagacagcgaacaggcaaagaagagtgtggatacaccggccaatatccatcgccgagacttcgaattcaaattcactgttggccgtctccgcggctcgctcttccgtgctgacccccacgacccgcaacgagatcagttgctggttgagctagttgctgaaggatttgcgctggacttctacatgcgtccctatgacatggtcgccgaggtcattctgaagtccttgagcgtggatgatcacattgaagagaacccggtccctgaattcaagagaatcatatcttctaaaggctttgatgccgacgaagacaaggacctgttccagctgaagatggtacgggtcaaacccgagtcccctgagttagaatcaacgtatgaaggggttgccatgaaccttgatatatcggtctcgactatcaatcttgtcgtgacaaggaaaacgcttctcacgcttctggacttcattctccttacattcacaaatcctcaacaaccgactgaacccaacccagaagcagacaaggccattgaaggaacagccactgtggaagaaaagccggagcaagctgggaagattcgcatcaaggctaatctcaagagtattgctctcattctcaacaatgatggggtccgcttggctaccttgagtttgaacactgccgacgtcggtattttcctcgtgggcaagtcaatgctcattcagtctcggataggcagtctgactttggtcgacgatgtcaacctgggtgcagccgaggactctgatatccgacgacttttgaccatagaaggagataatttcgcggacttcaagtacgaaaccttcgaccccgagagcgacacatatcccggctacgattccgaggtctatctacggtctggttcaatcaagatcaatttcctggaggagccctaccggaagattatcaacttcctcgtcaagtttggaaagatgcaagccatcttcaatgcagctcgccaagccgctgccaaccaggccaaccagcttcaggaaaatgcttcacgtgtgcggcttgacattattgtgaagacacccattgtagttttcccccgtattatgatggatgatcgccctcgagacacaatcactgctcatctcggtgaaatctatgtcaagaatgaatttgtccctatggaagaagtaaaggacagccctgctgtcaacgtcatctccactggtgtccgcaatattcgccttacctccaaattccattttgaagatggtacatccgaagagctggaaatgatccagaaggtgaacctggagtttagcatctgctatctggagcatcaagcaaacaacccacgtccagacatggaaatcgagggttctctatctcccattggccttcgtatctcccagagccaactcaagttcttgctggagctgtcaaagtcgataccgggcgcgtttgccacagatgccgaacagcaagagctcgaggccatggagtctttgccctcatcggtgactgaacctacgagggaggccacttcgaaggccgcccaggcacaaaatggctctggaggaacacccgctgatagcgaaaacaaagagacttgggtacgactcgatatgatcttcaaggtcgacagtgtcggtttggagctcatcctagcaaacgacgaccagcccgtcggtcgcgtagaggactccagtctatccaaattctctctcaatgacactcgagtcaagctgcgcatgctgacagatggttcattggagtcggagctccttattcattcgttctccatccgcgatagtcgcaagcaggactcgaacaagttcagaaacatcatgtctttgatcaacaacgatgtccagcagcagttcatggctagcatctccatgtctggaggaccagagaagcatctcattgcgatgctgactattgacagccctcgtattatgtttgctttggattacctgtctgctttacagtcattcagccagtctgcatttgcctccgaagaaccagtggaggcagtggaggatgagaccgaatcacccgaggactctgaatcagggtccgatactggaagctccgacaaggcaataaccgaggcttcttcgggcgatgccacaggagcgggcatgaccgtatcattccgggtgaaccttgtcgacgctcaagtgatcatggtagccaaccctgccatccctcactccgaagctattgtgctcggtaccaaggaagttctcatctcccatcaaaatgtgtcgactctacagattcaaaaagtgggcatgttcctttgccgcatggataaatttgagacatctcgactccggattctggatgatttcacacttgagatgtccattgatagccgagcgcaagacaagggatctgctttgacctccattgaggtgcaccttgagcctctggttcttcgcttgtctctgcgtgatatcctaatggcaatccagattgtcaacaaggcctccgagatgaggaatggccagcagatagagaccggagaggtgaagaaaatcgcggacacgaaaacaaacagagcgcgttctgccagcaagacatcatctactattgctaagagagcccgtcgtctgagtcaaggagttgggaacttggataagacaactgcgccacaaagttctgttgtccttaaacgtgaagagctgtctgccaagattgacggggttagagtcattcttattggtgacctacacgatttacctctgctcgattggagcgttaagaaattcaatgtcgatgtgcgcgactggtcatcaacggtgaatgccgataccaacttcgagacattcttgaacgtgtacaacttctcgaagtcggcctgggagccgttgattgagccctggcagctgggattccacatggccaaggagatcaacccggatgttttctctttcgatgtgtattcgcacaagacaatggagcttaccgtaacatctgctacgattgcactcgcatccaaatcattccagttcctctctacggatcaggatgtcctatccaagccaagaggcgctgatgccccatacagaatccgcaactacactgggtttgacctcagagtttgggccgatgtcagcggagggggggaaggtccagcagcaaaacttaccgatggcgaagaatcaccatggcgattcgaagattccaccgctgtccgtgaaacactgacaccagaaggcctcggcggagtggttggtgtcaaattggaaggcagtggcttcgatagtatcagccgcattcctgtcgtgcgcgagggcgagaccatctacgctctgaagccgaagcaagaaaatgttcttcatcggctactcgtggaagtcaaactgggacctgacaatgtcaagtacatcacattccgttcgccgcttcttatcgagaacaacacccaaattcccgtggaattgggcgttttcagccccggagaaggccacctattgaagatagagaagattttgcctggcgatgcacgaccggctcccgttggatcagcatatctccattctatcgttgttcgtcccgatcaaggcttcggatatgactggtcacatgagcgactgttctggaaggacctcatcaagcggcccacacgcactgttaagtgtgttagcgaaagtggacagcagtcgcctcctttctatttccaagtcaacgcaacgtttgatagcaaagactcgcttacgggcgtgtatccctacatgagagtccgaatcttcgctcccgtggagattcagaacctgttgccctacgatttcaagtaccgcatctacgacaagaacactaagaaggattggacgaacttcttgaggaagggcggcgtcagtccggtccacgtcgtggagctgtcccacttactgttgctcagcattgatcttcaagataccgtcttccgccagagcgagtttgctatcgtcaacggcaatgctcaagactaccgcagagagcataccttgtctcttaaggatgaccggggtcttcaactgaagttacaacttcattacttcaacatccccaatagcggtggtgctttcaaggtttctgtgtacagcccgtaccttatcttgaacaagactggccttcctatggacattcaaagcaaagcattccttcagtctgcgagaaatgctgctggtcaaggactcagagccgacacgagagatgagggccgtgcacttccatacatgtactcttatgccaatgaggatcaacgaaaccgatctatcctgaaggtcagcgattctgcgtggagcaagccgcagagtttcgaggctattggcagcacctttgaggtcatcttccccgatcgccaaggcagatctgagttccactccggagtgtctgttgccgaaggcgaaggcaagtataaactgaccaaggtcgtcactctggctccacgtttcatcctaaagagcaagctcaacgaagatattctcgtacgcgagccaggatcgtccaacgtgcttcaggttcaaaacgggcagttggtacctcttcatttccttcgccaagtacaagagaaacagctttgcctctgcttcccgggggtcaacaaccaatggtcttctcccttcaacatcgcagacgtgggaactgtgcacgttaaattggccaaggcgaatcagcgacagaagctgatcaaggttgatatcatcctggaaggagcaactcttttcttgcacttcagcgtcgagtctcgcaattggcctttctccatgcgtaatgagagcgatatggagttcattttctaccaagccaatcccaacgtggaagacgacgatgaagacgaccaggctagcggctggaggccgatccgataccgaattcccgcgcggagtatcatgccgtatgcatgggactacccggcgaccaagaacaagtcgctcgtgttgacctgtcagggcaaagagcgtcatatcaaacttgctgagataggaaacctgatcccaatgcggatcccaccttcgcagcctggcggataccagaagatcattgacatcaacatagctgccgatggtcccacccagactctcgtgctgtccaatttcaagccatcgaagagtatgtacaagcaacaaagaggacaatcctcccagaccggcatgagcactggattcgaggtcaaggaaatgaattcggatgtcaacttcaaggcgcaacttcgcctaggtggcattggaatctcattgatcaaccagaacctgaaggagctgctgtatctcacgttccgtgagattgagatcaagttcagggagtcgagattgtaccagactctgaacacaacgatcaagtggatccagatcgataaccagctctacggtggtattttccccatcttgctttatcctagtgttgttccgaagactggtaaggagatggaagcacacccgatcttccatgcaatggttacacgggtcaaggacgactcgtacggtgttctctatatcaagtacgcgaccttgctattgcaacaaatgacgcttgaactggatgaggacttcgtctttgctatgcttgactttgtcaagattccgggtgcttcgtgggctgaggaacaagagggtaaactgtgcgatgaagacctcaacattccagagccccagcaggcagacaatggtcaggatgtgtacttcgagcttcttcatcttcagcccatgcagatggatatttctttcatgcgtaccgaacgcgtcaacgtggaagatgccatgcagccctccaatccgttgatgttcttcgtcaacgtcatgacaatgtcgatgggtaatgtcaatgatgcacctgttcgactcaatgctctgatgctcgagaatgcccgtgtctctttccctagcctggtcggcaatgtccgtgctcactacactcaagaattcctgcgccagatccatatcattctcggttcggccgacttcttgggcaaccctgtcggtttgttcaacaacgtcagctctggtgttgccgccatcttctatgagccatatcagggtctggtcatgaccgatcgtccccaagagctgggtattggtatcgcaaagggtgccacaagcttcgtcaagaagtccgtcttcggattctcagacagtatggccaagctcacgggaagtatgtccaagggtctcgccgcagctactcttgataaggagttccaaacccagcgccgcatgtccaaggtgcgcaaccgccccaagcacgcgctatatggaatcacggctggtggcaatgcatttgcaactagtctagcaagcggtatcggtggcttggcacgtcatccactgcaaggtgccgagaaagaaggtatccaagggttcttcaagggtgttggaaagggtgtgcttggattggctaccaagccagcaatcggtgcattcgatcttgcctccagtaggtcgaactcttttctcttcttgatattcataactaacaatttcctactagatctggcagaaggtgttcgcaacaccactaccgttttcgatgccgaaggtctcgatcgtgttcgactcactcgcttcattggcaccgacggtatcgtgcgcccgtactcacagcgtgaagctctcggacagttttggctgaagaccacggacgatggcaaatacttcaacgaggactacattgcccacctagagcttcctggtcgagacatgttggtcttgttgacgtacgcacgtatcatgctagtgcgcacaaagaagctgtctactgagtgggatatccgtctcacggatatccagaccatctccaaggagcgcacgggaatgagtatcaccctcaagggtggtgccaatggacctttcattcctgttcaagacgaaagctcacggaactggctgtacagacagattgctgttggtaagtgatcaccagatcatgctaaatggtgacatatgctaacgaatcccttttccagcggtcaatgctttcaatgagaagtataatgccaggggataaagagaaagaggtactcccctgggttcttaatgatgtcatgagatggactactttcatttttgggacggggattatcaaaactcacagagcatatgaacggtaaattgctctaggtttctcatcttgttccattcacgtacataatttgcctaattttgtcctggcccgttttggtggcctttctactgcttctcctttccgtatacagcgacagtctagttttttttgcaattccatgattcgtttaatagagctcaatcggacaactttagcatgcagaatggacttgcctttgtaatatatttcctagtccaggaaccggaacaatgggttcattgcttaattcaaatgatatcaaagggctttagattcctctaaattagacatggaagcaaatcatatgcgccttctacctcaacgccagacaactccaagcaaaagaaacctgatatctcaagccaaccatctcgaatggatacgggtcaaggaacagccctcactggccccatttgttgagccgtgttcttgatcgtatgaaggaacatagacgggaagcaatgtctcccataacgatcctcatatagctagaacagagaaatcagcaaaattgttcctaatcccaaagccagagcaaaagaatcaaaccagcagaaaaaaaaattatatgtactcaccactctcccaccctcatgctccgcagtcctataccccagccaacgtctgtacaaatcctccgcgctatgtgtcgtaaacatatacgagagccggtacattatatgatcaaacctatgatcaaagttccaaatactgacaggagccccattaacgttctccggcggaccggggttgtagatacgcgccagttccttcggcgtccactgtccatccgcatagataggatgaggaacatacacagccttgaggccatggaacaaagcccacgatgcacccgtcatttccgatgcaagaccaagacccttcgtcgcctgcgcgtggtggatcagatcaagcaaacgcttggaataccgacccatcgtgatgaccgcggcgcgacgcggcgtgcccgccccgtttctgaagttccagagcttgtccgggaatgtccactgcgtatcttgtgggttgaagattggcaggaatgttatgaaatctgcctcttcgcctacgccccaggtgtagttgtcttgctccgggtatggcactggcgggtccgggcccagtggtctgatcccggtgccggatactgggccccagattgtgcggttggatctgtcggataggctttcgtgtaccatttgtgtgaactcgctccagttaccgtgggcgccgggagtgtagaagtaggcgttgcgttcccagaggtatttgcggggttgttggcgtgcgaatgagacggcgcggtctaggaagtggtagatgtgtcctgtgtgtcgactgtccatttctagttgccaatagtagtcgaagtggggatacagctgggagaagatctgcagaggttggtggtgttggagttggggactgtgagtgctgttagttaagagtgtcttgaacatcagtcagggtcaagggttgactcacctgtgttcctctatcttgggataccaagcttccaagagtttgttattgaaaaaaagagccatattcctgaattccttggggatggaattctggagtcggttgatggtcttgatatcagagaatatgggcatctcgctgtccttgacatgacacaggagataaatctgatattccccaccagaatgtaaggaaagttccataatcaacgcccgaaggtattcactatggtgaggcttccaattgagcccatgccacgcccgaatcagcaatgccgagcgaggttggtactgcttcacacctgtagcacgcacaggtggctcccatgatttgtgaggatcctggggaagatcaaaagctagtggactctggcttgaagagtttacagtctcagtcgactcgtatctgtctgcgttcctctccagacagaggttttgcaacatgtgccaatcaacatcgcaccacgctaccgcgggaggacgcgtgaagcccggcacctcatcctcgccatcatcgtcatatccatatgccccaaagcgggagtaccggtcggtgcaaacgtttccgtctagatccaatgcctcgtatgatccgaatcgcggtgctggaaacccggcttgttggcctttgtagacttggaccatatcttccgcagacctgcggtcgagatcacgacccctaggcccaaggcagggctggaactttccatggaacttcttcctccattctcggctgttgtatgccgggtatggatcgtagataagtgggactgggtgcgaggcgtcggcagactcggtactagttagggttaaggtaccgccctcgtagaatcgcttgtctctgatataaggatcatttttagcataatctttatataagtaggcccataaggtacttagaataggtaccgacctccgatcatgtgccatgcctaacgcatctggcgcaggtgagtcgtcgcctgctaccttgtcccacacaccaacagtcccatgatactgaccaggccgaaggacgggacgatgtaacgcagcatagacagtctggataatatttgtctccgggtatccaaagagatatgagctagtctggagaacagcgattagacaggcagaataccccaaccagcgcaaccaggtccaccggcgatcccatatggtcatagaagacctagtgtaaaatgaggactgcgtcgtatttcttgtaagaaatttcatagcgagcgacagttaagtaaccaggtggacggtggcattctttggctttgaaagccaccagatgtgtgtggtgtgcgtggataaagattgtaagagacgtgtagaggtgggcaaccggataatatggacagttcaagcatatatgggaaggacgtaacgcgatggatgtgtttgacggtaatatctacgagactggagcatttgatagggtttaggggcctacgatgtcatcactacgcggtgttgactgcatctccgactaacatttgggtaatgacactctggaatccaacctgatagatacgacagaaaactggcagaagttgcacaagccgaaatagttatatgttggatagtgcacggagtaatctgctaatctacaagctgtgtgattgtcataccatgtaacacgccggacatacgagtactctgttaacagtattagatcgggatttcctatcccgcagctgtgctaaacatatttctataaaaaaaaggttcatggtagcagaagttccacaattttccatttgacgagcagataccagccctattagacaagtattgaattctatcaaaggaacaatatatggtacatatctacctacatatcactcggctcattatatacagtattttatggtcccccgtagtagggcaaattcgtgtagcagggcaacagaagctgtgcaatggggatcgtacaattaatctggaactgaattttctagtctctctctctgtgtgtgcgttgctttacattgcgatgcaattagctttcgctcttttgagtccgtttctttggcattctatttattggtctatctccattctctacaagattatggattctagtggcccttggagggaaaacgaaaaatgttgcataacatcggggtcctaatcggagagcccgtgacgactacgccagacgtccgtttatctacctccccactatatttatgttttgctcacttatgaagttaatccctatccattctcaattaactagctatttgaagaccaaccaagttgccgaactcttaaatcagacacataaagacaataacacgcgctcaacctgttgcccgcttaagtgggctcccgacagcttgttccaacaggtaatgtcgacacctgtgccgaacgcctccaaggaatagactttgtcaggagcttcgcccggcaagtgtcgaatactccttcttgtcatgcatatgcatggtgccggtgccattcgcaaagatgtggtgagttttggcggtgccatacttcggcttgatcctggcactgatgatactttccggatcattgcggttgaagtgagatttgtggatagggttactgccatcgttgcgacaccttcataactcgtcatcagtagtgaacaatagcaaggaatgtgctcaggtatttacaagatttcgacggattcaatttcaccaactttctaaaaggccgttagtacacatgtctaaagactaaaaagcatagcgattttgataccttgaccgctccattgccgacataagtgaaaaaggcctcgccgaaaggctcgtcgagtttttcggcagggtatctggtgagactacaactagtaggctcggagaagcagaagggagagagttgtattggagaaggaggaagcgagctcccactacaactatctacgtactaccagagggtgagggcctagacccacatgtggggtctcaccacaacacacccccgtagggcccaacccgaaagcagaaaccatgaccccttccggctgtcatagtaaaaactgcgtatttttatcaccttttgatgtttcttttcatctgtttttatcctttttcatgttctttttccatataggtttcaatgtatgcaaaccacaatgcatgtaaaccttacttctttccttcgctatacatcatgatttctcgcattctttcaaattgctcccttcccagcggtttagtcaatatatccgcgacattttccgcacttaggatcagagtaaaagaaatgataccagttctcactatatagcggacgaagtgataccgtgcatccagccattttatagcctttacgaaattatccttctttatgatagtatatgcattatcactatctataaagattgtgattggaaggtcttagtgaattcctatttatttcataaccttatatagccatatcgcttcacgtactacaccatctattgcaatatactccgctgatatagaacttctggcgacaatttcctccttacgggagttctagctgattggcgatctagtatagaaaaagatataggcctcggtgctcttcctatcttcgcaatcttaataggacgcatctatatagccaataaggtcattattatctctatttcttctaagcaggattccgaggttcttcgtcccttttaggtaacgaatcagctactttagagtatcaatgtcttcctatctaggtgcagaggttcgacactatagcttattgactgctactataatgttaggtcgtgatttatcggctagctatcttagcttgccaatgtcctctataaacgctgaagcttcttcttttaagacggatggtttgttatatacctatgataccatattatcatcgtcgttctgttccctttagatgtctttgttgttctgtccccgaacgtctttatcctttagatcccttatgatatctgggcatttgtagcctattttcatcggtagatagatatgagatatatcttacaatctagatttgacgaccacttctttagtgtatatagcttagtttagaaagatagcgccggtctcggtgcgggatagactgctccctaggaatctagctagctttctaaggtctttgtagcgaaatgggatcatagtcttaaactagtcaatttctgctgctttaaaagcagctattaaggtattatccacgtatagtaggatctagatctgcttttctctatagatccagatatagggtttatctaggagaggttgaaaatccatgtctcttagtgcatttgctagagtttcgtaccataggtggcctatctatcggagtctatatagggcttgaagaataagataaattttatctttcttctctctatctggacctctagttttaaagctagttagttgtcttatatagatcaccctatcatctatcatagcattgagataagctaccgtgtaatccacctgttcgataattatcttgttaacggctactatactcagaaagagtctcatagtctctccgcgtgtaacgggagcgtagctttcttaaaagtcgaagccgggacgctaacggtttccacaaatcacctagcgagctcgaaattcctatacctcgttgtctttgttgatttttaaatcgaagacccattttctaggtaaaactgtgcatccggatggtggtcttagtgctatttcgtatacttttatatcttagagctttcctagctacacctttattgctttataccatttatctttgaactctaactttatagctttagcgtatatacgaggaattttaactctctatactttaagaccgctctctgcacttgttgaaccttctttagggactgcttccgttaataatatagcaaatctaatgctaaagggtgatccgcgctagtagtcctatagcatcagtcctatatctccgctatctccaaatcctctatttgttacggtttcttccaccgcatattgtgctcctcccctattgtcccgctctccgtatttcttctatctgatatctgtatatctctctagtgactgtcctttgttagatctctgtgatctccgaggactcgatagattggtaggggggttcggtgggacggaagcactcggtgcggtaggacttagtacgtttagattcgattggataggaggtctcggtataaaaggggtaggatatagtctctctagtggatttaaccttgctaggtttgcttgctattcaaccgcttatcttataagttgaatttactactattagtgagcttactgttgttggtgagctactaatagggaaggggttggagaaggtgtcacttcctatctcgatgctgtttctggcagaagcgggtagttcactgggtggtatgtatgctactacgtagactacggaggagagaactgctaaatctggcggtctagggtctctctcctatctcttaaagcttacaccctgtcctccagtgtgtttcttgcttcctatatattatatatagtctctgtgttataaaacatctctacatcgtcactattgaatgaagtttcttcttccacccccgtaaaccggtgctcttcccctgagctaacatgctatccggtatctgttgaaccgaggtctttggctgcctatctggctgttttgaatagagcttttcctagtttgaactgcgtttttagtgtcactttatcatcgacagattcaccaatttggaaatcagcagctccgttataggttttcggcgcctttggctcctagaagacaacgtctctataaactatcacctttttggttttggggttgtagatccgaaagcagtgtctattatcacccttatagctaacaagaaaaccaatctatacacgagggtctattttcataccctatactctggtctctttagcttggtgaacgtacgctttcgagtactatactcgaagaaatgacagattggtagtggtatcatctccacgaagacctattgcctttctctaggcaagaattggagcttcttctccgtgtcttataagccggttgataatatacgtagcagtatagcatgcttctgtctatagttcctttggtgcacccccgtcaatatatatagtcctcgctatctgcatcacatagtgaccgctgaactcggcgacactattttgtttgtgtgcataagctgacgaaggactaacagttaggtttttctcttttgcccacttctggaagtgtagaaactcagtcccgttgtcaaatctccactctattaggtagtatctagtatgattcttaaatgtcttagcctataagattagtgtaggtgaggcttcacctttctttgcgatacagatcgttatccgaaaacgagaagcgtcattagtaataatcattgcatgctcccggtcttgctttcctatcttactcaatccctttggtttgtaagggtgtagatcaacatacactagctagccaaccttagtcgctctggcttgtttctctcgggagactatctttttggactttgctttatggtatggttcgtagtcaaaacactctatactaacatcttctcctaatttgtctttgttaatccgacctttatagcttcctatatgaccgagtcgtctgtgtgcaagctctgctaagatcaatacgtatgaaacagctgattgctataccgaaggttgatttattatctggttcttataaaggactggatttggcttatctactaattcaataaaagggacgtttataccgacgaaggtgtatcctatcttagctctgtttttatcccgaattattatattatctgggttccatctgatgcctttttgctagcggattgctagtaagctaagcagattgaacctgtttccggggttgtagagatattgcacttatagctcgtatctggatccatctggtctccggattggaaggataatatcaccggcaccctctgctttagctctctggctagcgctagagtcctatcctagaccttcatctgatttgtatactttgtaagaaatgaacagatctctatttaaatagatatgccataaagaaccagagtctaaaacccagtcaactcccgtccgaagctagcgggatagcatagaaactactaatccagctagtcccatctcttcataagagatatcttcttcttattagtctgaaaccggtctttcgtattgaatcaggtccatttctgtctctgcaattgctataccgccgaagttatactccctagctagctccgatgacgttgctaataaagctacggcgtcaaaattggcttgccgtgttttctccgttggtttactagcaagctactagtctttattcttattaaagatcttgttatcatgaaatttccagtactatagacctagctttggcttctagtttaggggtcgattgtcacggtccagataatagcagactttagcatcatggccctatataccatagtaagaacaggcgctattagctatacgctaggttttatgatttttccactcttcgacatgcttcttagcgtatttgcctagcggcggtgcattcattagcttatctttctttctatctgataacggtgctagctagcgaaaggaggcctttagagcttttgttgcactagctcccattcctccgttaattcctagcgccttagccttattattcatcttagtgcaaatcttaagataatctgtcatagaaatctctgttgctaggtccttaatgtttttcatctcatttatcttaatctcgattgcattctttatctctggaatctgttccaattccgtcattatgataacaagcgctgtgaacggataaagctttgctttcagatcatttgctactttgaaccgctatttcactccgtcgataaactctatcacggtggtaaactcggttcgctatatcctgaatagctttatcattactatacttagagcagtgtaaccttcaccccgcatatacagcttcaactgatacataaagtcatctgccagttcaattctctctccagagttggtaagatcattagcaatgtccgggtcgatgcactacgttagccatcctactacctggattgaaagtgtaacccagtcttcggcattctctgcatctatgtccggtctctcgatgttcttatcaatcagcctatgaaggtgatgtcctcggaggatcttgtacactccgttgtaccagttatcgaagtcttccttgtttttcaacggtggctctagcttatatagcacaaaactgccaattttaggaagcttgtctgcctgggttccattcgtcctgactatatccaaataggcataccaatctttggactttgttgcacctctgccaatagcaggggtcgcattgttgttgttattgcccgcaccaatagcggcgtcattgtcgttgtctgcgtcctccatccttcccggatctcttgacgctagtgttcaccgacgtgaattgtcgattcaatggttgtaaatgatgtcttcgacctgattggtcgaatcagaatgtatggaaagtcgaactaggatgccgtccgacgaatcaaaaggtgtaaaaagggtgaaaaaggttggaattgtggggtaaaacccgcagtgaaaactctgatttgcaggttgtgtgggtcccaaatttggtgatccaccctgctgcacgcctatccgcgactctctctgcacggaataggtcaattttgatgaaaattagatcgttgcaatctgctctccttgttgatgaaaggtaatgaaagctctgggaaagagaaagggtcataacctggtgagactacaactagtaggctcggagaagcagaagggagagagttgtattggagaaggaggaagcgagctcccactacaactatctacgtactaccagagggtgagggcctagacccacatgtggggtctcaccacaacagtatcccagaaatcgcactagggttcgactagcagaatggaaggttcttttgatagacatggtggctttctagtactctgacagaagcaggtaataacaaaacaatgaagatcaactttggacgatgtctttgatgtatgctatcttcgaaggacctatgggtttttatatctgagggacatgccaagttgaaacggacagctgtgctcgaggcgctgtccaaatgtgtcatttttcacccacctagtccagttttgctaattgtgtttcgatagtgaacatgtatagccactccggcgtcgcagatgtgcaccaacagcgctaaataacgtaattcaagttcaggaccctggctcaaggcaagaatgattgggctagatgaacctatcggtgatcatacacgggaagtctagcggcatcaatcctaggggcggctgttgattggaaagccacatgctgttggtcaccagaaataggcaatattccagctcgaagacacagcacctaactatcccaggcgtcacgccttgactcttgtgtggtggaaagtataatgaatcaggcatggttatttcactttggtcgaatgagaatcgtgatgaaagtactgatcgtgcatcccacgcggttagatgaaaccgttcattggtagatgatactatcgcggatataggatgcctactagcattacgaaatgctaaccatcctatggtcgataagtctatctggagaacatagaagtggcgagaacagttctgaaacggtgtcaatgcgcttgcaaacagcttttattctcataaagaagtgctcagtggctcatttcctagggccttggaccccaggtaaagtggacccttctaggggcacaatcacctgacttggtgatattctacatcacccctggcgtctcctaccaaaacatctgtaagccccccaagtctacacatattcagatttatttcgctatctcttccatttacaaattgccgcgacaaagttgttctacttcccttaacatgttcaagtcgcttctgcgctctttgccccagctcggacggagatggagacctcttgatttctccaacccgaactttgttcggatacccgagtggcaaaagatcgaagaggagactctcccagactataccgcctcgcagtattatccaactcggataggagaagtcatcaaagagcgatatcaagtcatcggcaaattgggctttggatctacatcaactgcgtggcttgcgcgagacatgaagtgagatccctcatgatttttgaggatggctaattggagatacttatacattttatcatagtgaacgacgttatgttatgctcaaaatattcgtccaggctgcatccatgggtgagcatgtggataacgaggttaatatgtacagacgtatggagcaatccccaaccgcccatcctggtcgcaacgttataagaacgttacttgatacattctacatcgacgggcctcaagacaagcatcgatgccttgtgcaccccccgttatgggagagtgtcttggcttacttacgccgcaacccagtagagcggctaccatcgccagtcatcgcagtcgtccttcatcgcctctttctagcattggattatcttcatacagagtgtcagatcgcacatacgggttggtagtccttgtctcgcctacttctttcattcgcttattattcttcaaatcagatatcaaggccgataatatcatgttcggcatcagggatgattcagtctttactgacttcgaggagtctgaacttcaacaccctgtgccgaggaaggaggtagacaaagacgggagaataatctacacctcacaggaactcaaaattcccaagcgagtcggtgccccagtcctttgcgattttggttcggccatgctcggtcaatatcactcggtatttgttcaacccatgatctatcgagcaccggaagtgattttggggattccctggacatatagtgcagatatatggaatgtgggatgcatggtaagataaacggcatgattgtgattcgaaattgctaacagttgaattctagatttgggacctgtacgagggcggttccttgttcacaggtttagaccccgagtctgagaggtatcggagtcgagcacatcttgccgagatgatcaatcttcttggtcctccgcctgctagccttcttactcaaggggagcttagagacagattcttttcaagcgaaggtaagcaagtttcttatttttgcaatatcttcctggtatctgagtcaactaacccgatgattttaggtgattttctcgctcctgatttattgtccgatcagattccgcttgagaaaagggaaactaccctcgaggggagtgtggagagagaggctttcttgcgtttcatgcgcaaaatgctgcagtgggaacctggcaatcgtagctccgctaaggagctggcggaggatgaatggatccacagccatatgtagatttgcatcagggaataaaatactgcatgctgcgacaaacaccatgtctgtctgattcgtccgcatgggtcgatagagcttaggccacacgccaaacgaatagtgacaggacgagtaacttgtctgcatcgatcgaaggcccctattaatggcaatactccaggaagagaagtgagagaaaagagcaaatgaaaaaaggcaagatgaacggctgcctccactcagccctctcaacatacaggccgagtatcaaaatatcaaatccgtcgtaaacaacaccagtggagctacgttggagaggatagggtaggagaagcgttctaaaataggccgacgttcgaaatttcacaccgagctgtgtaagcaaagctgggtatggaagaacggtgcctcgttctggcaagtcaagaggtactaaagggacaagacaggatgtgaccgggtgctataccctatcagaagagctcatgctttagggagaccgaggaatatatacgaacggccattaatcacattgttattttattaggagtcgtctaatcagagaaccaatgagatacccccgccacttcaatgaaaccgaagagtgccaagtgctaatgcctagttccatctacgcaaagtagctcttccatagaacacccgataaatcttctagctgatccggtgtgaaagcctgtcgtaataatcgttagccatttgcttcgaaagacgatcgaggggtaacgcatgcacgaacctttgcatcaatgtgccaagtatcttgtctagtcttcttgaactcgctgataatcgacttcacgctcgaaccaacgatgccaggatcattagcagcgcggatactgagcgaagtcaatgcctcgggcatccattgaggaggaggactgttgtaagggaaggcctggatcagagcgccaagacccaggacagcaccgtggcgaacaataatcaagcggttgtgctcgggagtgggggttccagcgccggatgagacagcagaggaggcaattcctgaacggaagttcttcggtttcttagggagggggttgtcgatcagaaccttcgtgaagcgttcatggaaccggctgaccatcttttcccgcaggaagacaggcgagcatcggaccataccggatagcgtggccgaggcgccagcgcggacttcgtgctgggggtcttctagcatggaggcgatacactcgaagagcttgtcgcggtctgcggggtcgagcaggaacaggcggcggaagtagatgatttggatgttgatcatgatccgcaggcgctggtgccatgatggggatgtctgtccgatgcggatgagagattggatgaattcggagtttctctcggctgggtaggggatgttggggaggtgacggaagacgtggtatgcgagggactgaagctccgggtcctccttcacatccatcatgtgcaggagctgtgcggtgaagacatcagggaagaatgagacaagctgggtacactcgtgagaagacaaagtcgagtccagccaaaggagaacagtcttgctacccgaggtgtaggatgtgggtgtctgttggccaggagtcctggcctttcgccattcctcgattcgactgaaaattccatgaatcacctttgtaaattcttcggaaggcggatacggatatgcgccaacagaagaggacgatttctgggcctcgagaagatgctgaacatcagggtaggactcatggtacctcgtgcgataaatagttgcaagagtctgacccattgcttcgcggacgcccttgtatgggtggtccaaatgtgcgaggaaatcttccacaatgggtttctcaagctgataatgccaaccagaatcaatgatacattgatgcaggaggttgatcttggaactttccttgaacgctgcgttggtcgacatgtccagacggaagctggatagccaatcgaccaacggccaagcgcggcggggatcacggcattgaaggatcatgtgaaggaatgttgtccagtagccagagttctccggagtgaggccgtcggtgaagatctttcgtacaatagggaatgcatactcccagaccatggtccgcttctccacgcctgtatctgtcacagaggagatcaaagctccgagaatttcagccgtggcacgatgttggtgtttatcactgccatcttcaaagacttccttgatctcttcttggatttcctcaaaagtaacggctgtaagcccatcccggatcatgagctcgaatgcgtagagaagcatcatggcacaggacatgcggaacttgtcagcagatgggtcccgaggctcttgcttcaagtacatgaagaacttggagaaccactggcgagtgaacaacttgcccatcttggtgcgaaccttccattcaacatcgtcatactcgatgtcccgtgctacattggacttgtaagctggcatagtcttgccccacacgagccagccagggaagtcgtgatcaacatagtactccgcctcaggcttcgcaaagctagaaaggtattcttgggtgtattctttatcatagggtttggttgcaaccttgatctttgacgggaatcgctgatgaccaagaatgtagttcttgtattcgtgagtgcagatggcccgcacatcgatcatggtaaacagcgcgatgagagcctgggagtacatgcctcgcaagccagggtggtcgtcaatagacccgagtgtcatcagttcaatcatgttgtcgctggcgatgtagtcaaagcggagacccatagtgatgacgatggtcgcagcacgactggcaatcttccagtgggatactcgcgccaggttgaccagctcttcggccaggtcggctttcttttgctcgatagcaacgcgcttgctgttgaccactgcgcgctttttctctatctggtcagtgacatcttcagtaggagcaattgcctccacaatttcttgatctaggatagccattcgctccattgcgcggccgtaatccatgacctggaagactgcggtggagcaaattttctggacggaaggcttatcaacggcgctggcatctataaaggttctgatcacggcaggcgcatacttccagtgccgcccgacggttttggctacactgctcagaagcagcgagtagagcgctcccttgatgcgtgcatgatcattttccttgacacccctttgcaaagccgtgagtagaggggggataacgagtagcctaccgccatagaccgccttgagtgccgattcgcctgcgttttgagcattacggcgcgtttccgtgtagagcgagacacaggattcggcaatatcaagaagaagaatttcatcaagcttagaccgaggacggggagaagcgttgtgccgtaggcgttggagatggtagacgttggccctgcgaacaagcagggctctagggtaatcttttcggataccactcatcttatacggatgaatgtccgcggccaagagacgagtcactcggtcgagtacatgagcggacctttcaatgcccacatcaacaaaccacgacctaaaggcagaatataaagccccaaagcaagggacatcatcctcttgcttatcgctcaagaaccggtgtacatcatgcaggacccagccagttcgctcacggagttcatggacggtagtgtatagcgggtctccctccttgagggcatacccagtggggtaggtaaaagcctgtctgattatagcatcatcagagctgtccaggacagtatcggcatcttcatcaacactattcgaaacgcccgaatcatccttcatatcgacatcctcggaggtgccatttgagggtccttgtgatgtggtcgatgcggctttgggatcaaagagaacagaaactccagacaacacgagccgcaggagcacgaggttcctagtaacctcatctgaccagtccttgccgcttccatcacgtttgacagttgatgtttcatgagtcagcgcagatagcgacttcaaagccgtctctgtctggattttgaagacgtcgacggcaaactcaatttcctgacgggtcggcacatgccaattgatgttgagattattcacatccgccttgtaactccagagcttcggctcgataccgttcgctttgacagaaggttcgtagagtgagaaatcattagtgtatgtcccagtcaggttgagcaaaaggtggtggataaagttggaaatatgaactgtaggaatgccacggcagttctgttgcatgtagactgcaatgtcaaacagttcctggcggtgaccaatgacggcgctgccgacatgcaccacacacatgctcagcatactgacattccagaccagagctcgatcacgaggcaaaacatcggttcctgtggttcgggttgatccagcaccattatcttcaatctccgttcggatagctgaagtcaagacagggatgaaacgcttgagggccttctcggggttaactttgcatagggcgttgcaaatgaaagccattgcatcacgagcctgatgaatgacatggttggacacgaaatccacaatcttccccaaagcgatatcgtaatactccggggacaaggaagctagcaaaggcatgaacgtagcaggaagagtatttacgatattctcttcgggtgaaccgttccgaaccctggagacgtccggcagattttccaagagtgtgaacacacggccaaggaaagctatcgtgaagtctccgaaaccacatgtcgaagagcgcaagatcaattcctcggtctcatcatccaactctgtatcataacccagctgtacctcggaaccctgctcttccatcctttccatttcacctgagatccattgcatggcgagcatgttgcagttgatgtcatctcgccctttggtcaagtcgaccatcggaatattgtaacaggccgattggatgaatgaaagagcatggagcgatttttcaagatcattcgcgtcaattccaggcagcgtcagacccaacaaagtcgtcatatgacagcgataacccttggtgcgcgaaatgacacgagacagcgatgtcatagcccgaagcgaggatgcagtccggtgcacctcgaccagaccttgcagtgaagggtagattctctgcaaagccccgggtaggatgagatgcggttccaagtaggccaggccttgcaaggttgacagggagaaggtcatcgcagtgctgctcttagcatatatgcccatgaagattacatcacggatgcacaagacgaaccgccgcttcagaggctcattcaatcgtcgctcaggggggacgtccatctcaccggtttgttcgcgattccaacgcatgacgaagaaatcagtcaggtaataaaccagctgtgacagggtcttggtccaatggcctgagtttgaaggatggaagaacgtttcaacagcttggataagaccttccagctgtgagagaattgagacttcggcatccacacaagcaggggagagcgacatcacaatccaccgggcaatgtgatgagcaaccgggtgcttccgcccatcgcggtcaagcataatacctagaccagacgagatatccaccagggcactgtacggggaagtggattgcccgactgggatttccagcaacctcagtaccgctgtgaaaatgagagcagactggtcctttgtgaagataccatgctcggagaatggaatgtgagcggctggcagagaatctcgggccaatcgggagaaataatccagatatgttgtgtcaaatgtttttgaccgaccgaccaatgaccacaaatggaaatgggtaggcaggtggctctgcggtaggagatcggctcgcgattcaggagccggggaagtcggaagtagcaaattaatgagcccggcgacaacgaaggcaccttctgagaatgatgtggtataatgaggcaagaactcttcaagcatagcgggaagttcacacgggtcaatgtacaattgagcgaacgcacaaagcttggtcaaggtcttgacattccgcttcaggttggtcgagtgaacaaggccggactcggtggggaggacgaaagccttgagctccttgtataaaggcctccaatctaagacgaggtctttgactggttttagataatgcttgcgcctaaatcatgggttagcagccaccctactcccgcaaccaacactgataacccaactcacttggtgagaagcatgaacatgctcgaaaatcgctcggcgaccgacgggtcaatcccaggagcaagtgcaagctcaaaatacaattttacaaggctgatgcgctgcgcccgggtcgggtcgaacttgagcgatagccatccacgtagctcgcgtgtccagtgcacggctccggggttgaagtcgccggcctccactgcaatatagagctgattcaagatctctcgcagattttgattccgctcagtctcatcctcaagctggtatgggagatatttgaagtatggataggtacggggccgcacacgggctatcggttcgccttcgctattcacagcgactggctcaccaccgggcgaggttgcccgggagagatcttgtgcatgatgaaaattatcggatgtgaggatcgccttagggccggaggcttccatcgtcggatgggaggtaatggtcgacacaaggtggagatgaggtgagggaggagtagcctttgccgtcgggtgagctctggcagcaatacgtcagcaacgccgatgttccacgaggataacttattttccgcgcagtatcaagcagagaacaagtttggaaggaaatcgtactttcaatgaaactccgaagctcccactccaaaaagcgcgggatttggaaccggagattatatttcacacggctgtgttcgcatggggtacttttttttctcggcaggcgaggggggaatatgacgggctcgtattcgttgtgataattgagcagctcaggattacagcctccgtttcttcttttcttcttgaaatgcctagttgttgaaggtcaagaggtcaaaggggagagagacgaggttgtgatgacataattatacgtaacgacctaagcttggccctgcagagtgacccgcgtggagagatgcacactaaagatgtaaaatgctgttggtacagtggtttcacttttgcttttgatagtcctttgagaaaggtttgcaagttactctttctctctctctctctctctctctctcttcttgtctaatttataatagttcagtagttcagttagtgggcggctgcgccttttaccccaatttaggcagacagccaccttacgcaagcatatcgcccaaccaacaattcgggatggctgcatttctggccattcacagcagtctaggtcatgtcttataacttaaatcacatatcaatgtacaaagcagatgactcaatccaatattgagccgggtcatcgctactcgtaattctccttcatgctggaggcaggaaagaaccgaaaagaacaccctggatcaacgcataggccaccatgctatagacagcggccacaagagtccggctttgcttgggtgagcttgacctgagatctacagcactggtaaccagataccagtaccacaagggataccccgatgagatgcggttgatgatctgaacatggtagctggtgaatgccatgacggccagcagaccctggggaaccgccagccgagcgagcattgaccccgggcttgttgaggaggaagagggactttgtaatgcccacaggctagatcggcatagaatggccaacatgggcgctgccaacaagaaaagaggtatattggaaacggtccagtatcgcaagaatccaacgtccctattgcagtcagtaagagcgaggacagtggtattcggatgtgaatttactgcttaccagtaatgattttggacccagccgtagatgctaggcaaagtccactcgcaccatggccgaagatagccctcagacatgcagtacatacgataggccaggatttgagggatgactatcccagaccccacaatacagccaccaacaatgaccactgcaagacgaacagtggtgtgcaatgtaggacctttagtcaggatcttccaagccaaaactgccgcatcataggcaaataggaacccgctgagaattccattactgcgggccatggtgccggccgcgaacagtaccgcggatgtgagaacccgaatatctcgcaggcgtgttgccccattgcgctcggcgatgagagaggatgaatagaggtagaatccagtaatgttcaaaaaagagactatcgactctccatagggcgcggataggaaagcacctgctggtgaaatgatatgaagagctgcagataggaagcaaatgagatgttgggtggcagtcgcgtggccaaagatattggccgacagacgataaagcgccaatacagacaaataatgggcaacgtgggagagaaccactcccaccattgcagtgctggcgggtccagcatctccaccagagagacgaatacctattcatattattagtctgtgtggtatggatagaataacaaagggaattatgtaccggaaacaaatatagatagaagcttagtgtagccccagccaaaggcccattcttgctcaaacagatatcccttttcggcaatatccaggtagtagatactgtcccatctggcaaatttaaggggccccgagagagactcagattgggcaactgttgatgggtcggcagcatatgagatcagggaggtggaggtatcatagcccgatcctggacaggcggcgacgacgatatacaacaagaccttccatgaccaaaatgccagtgtcaagcttcgaattgggttgtctaaccgcaatagtttggcaaacaatggcggtggccttgtggtgggttgaactgaagccatgacaagtttccagtgacttcagccactgaccttggaaagaaggtggacttgaataaccctcagcaattttcccaatgcggacacctaacggaatcgggtctagatgtcgggatgattacctcgcgctttttggtctgccggtctgccgaggtaacgtaactttccccggaggtgaaacctgaaaaccttggaaggttcgcataagtccgcataattagtcatccgatcattcccccggccgtcgatcaaccttggaaatattaaaccctggaaattggcttctgaaggtctactatgaagctacctactaactacctaggtaggtacatacttgtattagagtggcaattgtaagggagattccacagtaaaagagaaaatcaacaaattccaggaacaaaccttacgttactaagtactccatatatcgtataataatttataatttgccaaggatttccattacaacatacctatgtattcccaaggctttggtcaagtgagctctgtctaagatcggacagggatattataccttcttggcaagccccatcttattggagcatgggcagattgcccgaggttttgttacctcataagcccatatactagtgtaagagtatccatattctaggcatggtgggactgttgtcacgttcagaattttgaatttttcatatttttcatttggataacctgagggatttatatatactaatactatattggaaccagaccaattgaagtcccggagagtttaatggactaacatctgtactccatagcggccttcggaatccaaaaaggacgatgaatgatcgccgcgggatccggatgtgtcggagcccgtataatcaccgatcccgctgacaagcataagccgaactttgcattaaaccatgcattaagacactccagggctttattaatattatattattcaacagaacaagcatattaaacacattagacaaattagacaaattagacaaattagacaaattagacaaattagacaaattagacaaattagacaaattagacaaattagacaaattagacaaattagacaaattagacaaattagacaaattagacaaattaaaaatacacacttttatcaatttgtgcaactaaatcagttccactatgacttgatgattactatttggtctttttcaattttgcaattttcaatttttattttttaatttacatagctctataaggctgaccgccccatttatattaagatcctttattgctcttgcagttttatcccttccactctttaaccctttaccttttaccccttgcatctatttctttcttaccacatattgcaggttacaatcttgacttgcatggccattttgttctttctgcagtgattaaacctttcccacacatagctccgggctgagccccctccccccgcagctgacgcatttgaatacgggctattcatgactagtacatcgggggtgaaattccacaaagtttcccacaaagttttggctcttcaacaccaatgtggctccgctagggctcaagaatgctgttgaatcttggccttacagcggatgccgcagcagcccacgcaaatgaacctagtaaccaaccagacactcagccttctacgtgtgctacctactcgcctaccttcttactgtctgctctgccattgttgaactccttctgcagtccccccaggcttcctgatggttctactgattgtccggggcttgtatccgctatggtgatgagtccgattgagtcggcctcgagttccggtgaagcttccaatgaatcgtctgctgttgtcgccaggccccgagtttcccggtcagccacaggtcggaaatctcgacccaaaacgtcatatcaattcgcccatcccgccgctcatgctcgccacaagcggttgaggtttcgtcctaagctcctcctgcagctacaacaggtgtcacaagcccctcggccgctaccggttgtggatgtcctgccatcgacgtcttacctgccattaatagcccgcaagttcccggccatctatcggaccagaaacggattgggtccgtatgacctgatcgtggtgttgagcgaacaatacgaccggacggtgggcagcattcctgaaaaacgtgtcagctcggaggatgaggacgaagatcatcgcgaggtggttgccacaatctgtcaaaagtatcaagaagatgctcgactgaaaggaaaagcggagatatgtctgaatttcgggcctgtctgggaggcttcgcctctcccaagcgggtcttatgagtttgtcgcccagacagagagcggtgtgcagatcatgcggtgggctttgcgtggtgggaggaatcgccggatgactacgccagggacacaatcgcgcgaggacggcaaacgcttcactttcagcgtcatcgatcctaccactcgccgacatcccgttctcgcgtccatgactcgaaatcagttagaagtcaacgatgaatactccgcggctgttcggtccggcaccggtcccacgactccaagctcaggaatgtcggttgtgagtgatgcctcggatgcagacacccccctcgatggaggctcggtcactcttgatgatggactgcgaactttgattgtcatcaccggcgtctgggtcgccttccgtgagggatggtcagacaacttccgctacggcgatgcggcctcttcatccggtacaaagtcgagtatgtctccgacttccgtgaagtttacatctccgacgaccgccaagaatgaaaccgactctttcccggataatgatgaagacggcaaacgctgcttgtcggtttccaatatccgccgttccaccaccccagccaccgtggatggaaccaaatccactagtttgtccaaacgctccaactccactggtgctgcattcatggatcgagcgaaacgacgatccgcttctgggcttagcactcgcctgaaccgacacagcatgttcactgccttgggcgaaaacggccgagacatcgttgtctctcgtcctccttctcctcaccaacaatccgctgaggtggaagattcatatcgagctggtcatcctaaagcgaagtctcctgcaaaagcccagccagaaacagaaaatgttggatcaaatacggtagcaggtcgagaccctgcctcaaattcccgcatcaaacagcatggcagcacccacaagaagaaacctgatgctccagcccccgagactgtcgactcaacttccaacaagggcaaagtacgccgccgtctcagtactttctttggcatttttcaccgaaaacacgatactcattgacctttcaattctccatcaccatgtatattcctgcatcatgtttgtggctagtccacacataggcatcatcacagcaccacgttcgagtctcatcgcatctggcataagttgggcgtttatacgttgcagtacgattcgtcaggtacgaatccttggccggtttcccttttcttctactctcctctccgtttcattccaactagcatcctgcatcctttgcatttgcgcgttcttccacacttctcttttcatacctactctttctcgccatatcttcatcttcatgtcctgggggctcaaactcaatgtgcatgcttgtatctcacacgtgtacattgctatccatctatccatctatccatcacgctacatatgaataaataccccaccactggcagtcaattccacaaaattttcattttatcaagtctcccaagtataggttcaaatatttcgcttatctcattaaggaatgaatataagagcaatatggatctccatttaaagttcaattcccatggtattcatggtattcacggcctttataaagctgcatatgtacgtaggcaacccatctcaaatccttaccgctcaagagcagtaacagccttaggaatatacggctcctctaaatacttaatctcctcaggagacagctgaaccttgatagcatcaacagcctcatcgatcctcttaacactgtgcagtccaagaatcgggttctcaccagggtgcgtcaaagaccaagcgatagcaatctgagccatgctcacacccttcttactagcgagttcctcaacccggtcaataatagccttatcagcctccgactcgcgactacggacaaacatcttcagcgcaccgtcgctattctcacgcaccgtcccgcgcgagccccaggggcgcgccagagcgccacgagcaatcggtgaccacgggataatgccgactccagcgtcttggcagtaggggatcatctcgcgctcttcttcacggaagagaaggttgtggaagttctgcatgcagatgaatttgtgccagccgttgcgctcggcgatgttttgcaggcattggaattcccaggccgccatctggttgtgggttagtgagatcgtggatggtaggaaggaaaagaaaaaagacgaaaaggaaggagggaataggaaaataggactggccatgcacataccgagctagcaccgatataccggaccttcccgctctcaacgacgtcgttcagcgccttcatgatctcctcgcgcggggtatcccggtccaagcggtgcagctgcagcacatcgatgtatgtacccagacgttcgacgctggcgtcgacggcgtcgaagatgtgcttgcgcgacaagccggtgcggttgacgaaggggccatcgtttgtagcgcatgcggcgatgggtgggaacttgccctcgtcgtcgacgccgaagaaacacttcgttaggattaccacgcggttgcgggggatgttgtacttcttcagggcttttccgacgatttcttcggatttaccgtgggagtacacgtccgccttgcggtaaatattagtatcttattcggtggtattgagaatgcatgtcttcaatttaccgtgtcccaggtgttgataccctgcttgtaggcatgttcaatcaggggcagggagtcttcctcatctaggacccagtcttgccattgcttgctgccatagcccattgttccaagaatgatcttggagatctttagacctgagtttccaaggctgttatttggtatcaacgtcttattcgcgtgggatgtgttcgagggttctgtaccggacatattccatcttattatcggccattgtgaaattttctggtttatttatgtgagctctagtgaatacagcgttagttataagaaatataaataattcatgtatcgatctcgttgattcacattgaaggaatatgacgtcaacattcccaagataagccctggtgcactccaagggggactcaccaagtgtgtcagcacaaattaactggcgatattcagtggaacaagggaaagaagatgcggagttattgagattcatgtagactaaagcctgaaatgagtcagaagagtccagaagagctcattaataatccaggtgaatctgccgaaaaccacaagcgtggggctgatgtagccgatgaattaccggcatatccacctccatgctgatcggtccggaacatcggatgttgagatctgatatagtatatgcatttatggtatattcaatgccgctatattaggtaccttttatacaccttagatctcttaacacgaaaaacatacatatgaattggattctcacaatcttggaagctagctatgcatagtaacattcctcaactcttgactggctcaccagaatacggccatgtgcccaacaactgcaagaattggcttgtcactcgatacagcatgttgcttggcgctaggagcagagaagctggctccgcattcatttccggcttctcgatatcagtgggaggatgaacccaggggaaacgactgggcacaaatccatcgattgtcacaccattgccgaaacttgcatatttctcatcgggattctcgtagactaggtcgaagtcttcccagcggacaatttcggttgccgcatagtagtggaggacagtgccgggccagggaacaatcacctttccattgtcgttcttgtctgtaccacagagcatgagtcaatgtgtaaatctaggagtggtaggatgcttacaccatgatttgcatggtcctgaccagaccatgtgaggcattcttgactggacccattggttgaatgcgcgttgagcacactgtgtcacagatacggaccgcagtctgtctgtctgcagtcgagataagactcgaatcatgtagtcacttgctcgctggatgccggggatggcggacccattcacagggcagattggcgggttgaagactgcgagatataccggttagacaccataacctcaaaaaaaaaaaaaaaaaaaaaaaagttcaggtgcttaccgaaaaggttagggaactcggcgaccattgcagccatataactctcgcagggtccttcgcgatcccactcttcactcagtgatcgtccagcgcggccagtgactgggaaccgtggctggtatggctcgaagccggtggcatataccaatatgtcacactcgtattcccctccagattcagtgatgaggctatgttcggtcagcttcttgattgagtcatgcacgtacgcagcattaggcttctgcaacgcatccagataatggccgccgggcgtgaagcgacgacagccagcttcaaattctggtacgagggcatccaagagatcagggcttgaaatcttggacttcatgaatgaatgtgccaatgatgtgaaattggcttgagattttgttcctctccacagtcccgtgaaacttgcggctagtctctgctctagtgagatgcagaagttgtaatagcgcatagggcatgtctgtagagcttgtttctgttcggttgagtctagatacagatcagcgcttctgtcgcaaacccttttcttttctttttcttttttgcagtaagggcagccactcacattcgcgctgaacggtaccatcctcagccgatacatgtgggaggatccatgttggacctcgcgcaatgttgattatttgcgaagcaacttgagagccccgcctagtcagcgtggtatgtcttcggtgtggctttgcaactcacctggctgcaaagctgccacgcactgaatggcgcttgcaccattcccaattacaatcacccgcttgtccttgacggtcatatcagctggccagtttgcagtatgtacttggactcctcggaaggtcttttggcctgcaatcttgggggacttgtagttgttcaaccgtccaacagcgtagacaaagacatcagcaaatatgctcctttcttcgctggtaaccacatcgcggagcacaattttccattttgaggagacttcattccattctgctaggatgcattgggtgttgaaggtcataaagcggcggagattgtgcctatcgactacatcctccaggtatttgtgaatctcgggggctggaggataaagcgatgaccatgaggggttaggtgcccaattgaactggtaggtgtgggaaggtacatcgcatgtgcatctatcaacattagcaaactacttacccatctgataatgagtctcacgggaatacagtcgtacatacccgggataccgattctcataccatgtgccccccaaggaaggatttctgtcgtatatttcgagatcgacacctgataacgaagtggtcgcatcatgtgcaaattggatccccgaaatactgaagcaatctgataagagagagtatcactcaagttcagtacatgtgcacgtacccagcaccgataaccacaatcttcaacgggcgtgccacaaaggcacttgggatgagatccattgcaggtaatgtgagagaaagttacaggaaaagaaaagaagaagatctccagggctgaaaagaactggggagacaggtcatatatcgcgtgtctggtcttgtctcgtcttctacacaacacgtgcgttctcaacgaaaggacaacagagacgatgtacacgtttctttgtttacatggatcagtctacatggtctactcaatgttttcaggatgtttcaaactccatgatgagacacgggaagactacggaaatacttccgtttctctgttggtagagaggtctcaacataatacttcgggaaacacaatcagcagtttccaagttaggtcttggagatggcgatggagcaagactacacagggctcataatctctcctgtttttattatacgccgtagtcctatctctgtttttattgatagtgattatactatccatactcactctctttcttcttttagtaactccttctttaaagggctgctctatattcctaatgatatgacatactaagagaggacagctaagcaacgtagatggttaaatagcagtcagaagcacgaaatggaagattacctcaatatatttcatttcattcccgtagctgtttcgacaggttgatctcttaccgtctctctagtcatatctgccattcagcactttcttctctttatctctctctctctctctctgccctcatacacagtacccaacatgttgattactgattattactgtagtatgtctactcactaccctacatgccagcaaaaacatctaacattaccagactgcattctcaaccccgaatgggacccaatcgagttcgaacctcagagcgagcggtcccacatcctgcgccagccagtcgaatgtatccgagccatatgccttgcaccccgcgagttcaatttcccaaacagctggacctttttcctatccacatctgaagaaaatatgacggcggtaagactgcattgtcaaccaacctacgagcgccaacccaccgttcttgaatatggctccaaagccaacatcgtgtttcaaaagagatcgactttggtcccacccaatggagaactgacctttgttctgagcgtgaacccgggatttacggtgggcgatatccacgaaatgattgttgcgaataatcggcacaaatttgagattgacgacgatggctggattggccggacctgggtctatgatcaaattgatctcttcaaccagcatggtgttttcgccaaccaggatgaggtcgcgctggtgaatgatggaatccagaaacggtggccaggggagtttcctgacccgctcgagatggggacttactatgggtgaaaccacgaatcaacaggggttgcctctttctctcattctgatgttaggagcctagtctatggtcaaatttctttttttcttttttttgttttccttttgtggcgagaacaaagctattttcttttgcccagctgtacaacaaagagttgttactacatatgaaaggctttttgtcactatccgaccctgacaatgtgagactgactcagtcaatgtaaacaactagccccgtagcctacagtaatactgatagcgcgagatacaggagtgctgatcttagttgaccgagcttctctcttactggtccgatttttggtgctcgtttttgagcactccttccaggtttcattagtctcgttttctagacaacctagataatataggaaatattgcagccggagcctagtgtagaactaggagttgacggacctatactccgtacaggtagaacgactattgaatctgtctttcctagcttgtctagtgttttctttctgcctgcagttgggaggaatgtatcattttacgaactgactcttgattgttttgagttagatattagttgtagttctctaaaggtcaaatatggtcataccatgtccatcatttgcgccatggtatttttctccttttggcctgaacctaaggatatctcattacaacataggcagacatataaggagaatgtttcagctttgagttaagatcaagcggagaaatcccttgaacaatttgtctggccgacaacttccctcttccatttactccgatgtcccatcatctccttaaattcatcttttaccttatagtccacggtcacgtgtgccctatatttaaatcattacgtcatgtgtcggaacccgaaacggcaaaattcaaagcgagtacgacactctacaggccattatcatcatggaaaagaaacagagcacgatcagatcccggaaatctcacaataaatcccgtgcagggtgtggaaattgtaaaagacgacgaataaaagtgagtgctttccaaacggtctctgagtccggttgtcgtctctcttcagctacccttgctaccttcatgaaagatgggtgtaaaggagagaagcatgtatttcaggatcccaaatactctgcagccatcaatatgtttgggggtgactagactggatagaaagtgggagttctgatgataagccactaatagcgtacagtgtgatgagaagaagccagcatgctccaaatgcatccatcatgctatcgagtgcgatttcctttcgacaacatctatatcaccggcttcatcctctgtagctccatccccatctaggccttcagagacacaattccggttcaagccttctaaataccaacccgaagaacgcacacccaaggatgaagcaggccagccatcttcgcagacggtctctacagaagtccaatgcgaaagtcccagtgccataccacagattcaggataccctctcatttgccgacctacgactcttccaccacttcgtcactgagacataccgcaccataacggacgaagcaactgaccacaatcgaatttggcaaactcacgttccacaatggggattcaccttaccatccatcttccacctcatattggcgctggcagccttgcatctaggctatcttcaccccgaggtgcgagaccagtatgtgatgcaggcggatgatcacttcacctttggcattcgatctgtgtcggctattctatcgagccttaactcggggaactgccagtcgatctacatgtcgacagtgctagtatgttttgtctatttcgcacacggtccaaaaccgggtgaataccttgtattcagtgagacgggcaaggcggaatggctggttcttatgagaggagtgaggtcgattttgatgtctagtcgtgataaaatctttaccgggatcttagaagttcaacccgaccgtgctattcagggcgtcagccacttgttacaagacgagcttggggaacatcagtctcatattcaacaacttcaacgttttatcgagacccaaactggcgggagttccacgggccaggtctacattggtgcacttgagaaattgctccaaatgtttgaagaagcatatcagtgtcgaagcgctgggaaggatggtgttcagttgatgccctttgtcgtcggatggatatacacgcggcctgaagagttcatcagtcttcttgaggcaaaggatcctgtttcattggttgttcttgcttattggagtatccttttaaagttcatgggatcctcatggcttatgatcggttgggaccggcatgtcatagcaggaatccatgagtgtttagcacccgaattccacaaatggatcgagtggccagtgagttttatttgcgattgatctggatggagaaactcattcaacgtcacgtctggggtatataaacaaaaacatgaaaacttggaatgtgaaagcaaatcatcgtaagcggattttacccccggacatgcacttcaccttacctccaatataacccactaaccccctttggggctagtgtatccaacgtcgatctcagccaacagcgcgctgattcctttcggcattttcacatgcggccggcccacaggttcgcttccccgtgacaaatgagaatagccctagagaaatgatcgacaacttcccaagtttcggacgcggcacataccatagccttggcgtataccatagccttggcgtcggctatacagccttggaatcggttagcggtaagagagttaaatgaaagggggctatgtgataggacctcgcgatcgcctttcttcccgtctccttcctttgccgtccctttccgtgaataatatacaatccattgttctccgtcgagacacacaggtgaaccttggaagtggatgatctttcccaatgtggtccgcaccccaggcatccagattcagactcaaattcagactcaaatttaggtggccgggaactcgtgacataatacggagtactctgttgggcaatatgacagcacctaatactctgccgacatcatatttgctattgttttctattcttcatccgggcttgcaacctcggtggggcagatcagggcttcggccatctcaatcacggcgtccgatcccaccgatgccagataatattatttttattaaattataggccgatgtttcaatgctgccgacattgccgagcccttcctttttgggtctgtcatccaagtcgttttcggaaggggccgataccttggaaccatggatcacttgccgtgggcctcggtctagactcttgcgtttcatggttcccagggtgacactcgtggaaatttccaagggtcttttttttatgcttaaaaaccacccaagtttaacatgcatataatataggtatctaatattcaatgctatacacactctttaaaccacctaattctgacccacagtagggtaatctgtataatggaaggtgttgtcctcgaatggtccatagaaccgagttcgatcatatggagccatggggagcttttccttcagtctgtgcactaggtccgggttgctggtgaagtatcgaccatacaacagaccatcgtatttaccagtttccactactccccaggagttttgatcgtcccagccaccggcggagaagaatggggtggaaccaaagatctgacggaaacgatcaagggtcacatccagcaggccccagcttttgaggaacttatccttctcttcagcgccgaagatttgttcataacgctgggtaggttagcagtatatcattaaatagagacgatgaacacataccggctcaataaagctgacatacgacagcgacgggagagtcttcttcagaccctcacacaggtgagtccaagtctccacacgctgctctccgcgcgcttggttgaacataccaaatggcgacaatctaatagccagattatgctcaccaatggtcttggccacctgctccatcaattcaaacacaaactggcagcgcttctctagagtaccgccgtaggcatcctgacgcttgttgatgttggagctcaaaaactgctccggcaggtacccatttccgcaatggatctcgacaccatcgaatccaatatccatagcagtcttagcggcaatgcaataatcatcgatagtctgcttgatgtgtcccacagtcatctcgataggcggatgattggcgtagggcacgggctctgtggagccaacgggcggatgggagtagcattccgtcggagaatcccacacagaggccgaggggcagaccgcgggcgatccagtcatctgagggatcgtagcacggccagcgtgccacagctggcagaagataatgcctccctttgcatgaacggcgtccacgactcgtttccagccggcggattgttcggagttgaacaaaccgggtactccgggcatgccattgctctgtcgaaacgttaaaaaaaattcaaaaaagagaaaatttaaagtttggataattgtcattaagcgggcaattccgaagggaatcacacaaattcgttatcctaaagagaaccttgcgcctccaaattgagttcgagatgcttacctcgagcgatggtgggatgccttctgagatcatcaagcctcctttggtagcacgctgggaataatactccacaaccgcatctccaggaatccaaatacgattgggttggtccggggtgctgatgggattcaatggttctccgcggttgcgggtcagaggcgcatggacgacacgatgttcgagggtaatgttgccatttgaaatagtcaggggtttgaagagaccagagtctttgccgctcaagtagtggatggtcatgttttcttttttgggggtgttctatgtcgttttactccgtactatggaatgaattatagaggaccgagggaattatagagagaagaagtggaaaagacagccacgcacaactccttttccagtccactgtcgatcactaaccaaaagacatgttgtcaaaactgtcagaagtacgaagtaatctggagtgccctcggctatttcaatagggttcaactaaggcccatttatctattttgtaaaacaacggcgttagtggcgaaccggtggaaaattctgggtctggcaactaatacgagacactaaaacggatactatttgcccggctgtttgacacccgcgatgccgatgcatattggtggcgtataaacggagtctagtgtcacctagcgttattcatagaaatttccaagaaccattcagaaatgaaaaatcgcccgttggtggggtctaacgcaaccccttgagcaatcatcgccatcatacatcccgcgccactattacatagtagtggttcgatagccttcaagtccccgctcaaattccccttcttgtcaatcctcattttcgcgatgtgaagtcctttatcttgtcaattccccggttcttttacactaaggggagggggaatcgaacttcaaacccatcatgactgtcgataacccaacagatgtcttgtatacagtcaatctcgtcacacagggtctctgtattccaatcgtgactgttttcgtagcattacgattctatacccggttccgattcaaacaatccctcggagttgaagatcgtgagcttgtcccttgcatgccatacatttttcgagaatttcactaaccattctctagttgcctgtacgattgcttgggtacgttaagcaaaataattcagtgctttgttagccaagtctgacttttacacagtttctgtttatgggatattgtgcaatagccattgtccgtaagtgctatacttcccacatgttaccaactacaatacttactctctacctagtcagtcaacatggcggaggatacaaattcaacgagctctcccctaacgagaaaattgcattccaaaaattctgctacatcgcgaccattctctactgtccgatggcactcttcgtcaaaatcgccctcctagcgatcctcacccgcatcttcgctccctaccgcggcaaagtctggttcatctatatcttcctcggctgcctatgctgttactacatcgtcgccctgatcatcaagattcgcatatgttaccccatccccaggtactggctgggtgaccaggtggagggaagctgcctcgaccagaatgccgccctcgtcgccgactctgtgattagtgtcgtcagtgacattatcatcctcattatcccactgccattgacatggtctctacaaatgtcgctcaatcgaaagcttcgcgtgataggcctgcttggcgctggtggactggccaccgggttcagtctttaccgattaatcatggtgttgaaaggctcaagtgatcagggcctcatgttcgttcgtgtcatcctatccgggtatgtccccccccccttcccccttaatatttctctttttctctttctaacgtctagtagtaatgccgagggaggtgtcggattgatctgtgcctgtctgcctgttctcaatgtcatgtttgcccattacaagaagcagtactcgtcgcagaagtactaccagaacggcggctctacccatccgttgagtgataggaaatcggccccggcttccaatgttgccgctgactgggacaaggtaacgaacttcggtgaccagagccatcttatttcctttgccggtcccccagaggctggcgagtccggcgagtctatccacaaccaggacggcatcaggaagacggtcgctgtatcacagaccgtggaaagatcttaatgctcttttcaaatttctcctattatataccatatacccctgtcattaattaccataatgaatttactttctgtctctttttcttcccttggtctcttacctgcatatactctaggtgtacgtgcattgccacttacgaaagtcggtatacactcgggtaatcatctttgtcctgtcgacgttgaactaaacttggaagacagagattgggtctttgttgctgtataccctttgtatttcatgagatcaaaaatcaaacaatggccttcacgagctcccttctcttctttgtcggaggacatctccaccagccagccatgttactataaataccttaaatcccccgtctactccgatatatcacagtactcaccacaaccatgccccgagtattctcatcccggcaggacaagctcctgcacgaatgccgtatcttcaaagccggcttagatatccaagccaacattctacgctgcgatccagacggtcgaggaaaggatcaacacgcggatgtatctcgggcagtagcaaagctgtctgctcgaatcgatcggatcatagacattgcactcggtgtgcttgtcaaagctccagatagcgagattattcgtcgcaatactgccttttgggaccgtgaagatgatggtcattataagttcgagaatgtgtttcttagcatggagcacgacttggtccatataacattggctctcaataagggtccgtgtcagtgcaaatgtaatgacattgctgcacgtctcgatagaactgcgaggaaggtttcgttccacctgaatgtttagaatgtgtacatatttatctatgaaatgatttactgcgaaatgtgtttattatcctgacattgtaaatctagatgtagattcaacgatgtgtccacttcaatcggagtactatatccgctacttcattactagttagaaatgacataacgtaattcacaagcgagtcggccacacaagcgagccggccaccgcaaaacacatagtaaatgcgataaattacaatgtgatatttcaacaacagtggtctatataaagttttacttatagcttaacgctttttagatgatatatagcctctttgcggaattttaggagcatagacgacttagtgattgagatatatatgtttctagctttttataacgtaattttcggtatttttcgaaatgatgataaaatagccttctactctctttgaaattgatatatggtgctaattagtcttatcgatgactatcgacaaatagggagnnnnnnnnnnnnnnnnnnnnnnnnnnnnnnnnnnnnnnnnnnnnnnnnnnnnnnnnnnnnnnnnnnnnnnnnnnnnnnnnnnnnnnnnnnnnnnnnnnnnaaatagggagctaaaataaaaacatggttgttgagatataaatgtagaatagatcgcatttactatgtgttttgcggtggccggctcgcttgtgtggctgactcgcttgtgaattacgttagactgtggataaaaaaaaaaagtagccggaataaaaaatacattagcaaaaaaagaaatctctccctcggggaatcgaaccccggtctcccgcgcttatcggtgttaatgacaagcggaaatcatcaccactagaccaaggaagattggatggctgagttactgctcggccacttggctggttgatggaaagacttggccatattgacctcatgagcgactctgtcgatgtatacatccacgcacaacccgtctatgtacaaagttcaaataacatttggactttcaactatcgtaatcatttcaaggcttagtggaacttccaaccttggcactatccccaaatgcttattaatgataatatttgcatccttattccctggaagaaattctcagaacaaaaaaccgaataaggttgcaatgatatatatctacggtgtggggatggcggaataccgattgacaacattatattggaaccggaatttaattatatcgggaggctgcagagaaatactatggcgacacatcataatcatctaagtgacggatttgggtcaaataaccccgagttaggccataatccatccaaacccgtatcaaacccaagggaccacgatccatcaataaatggccattgaaacatatcagtttcaaaatcatgatgaccaccaagcgaagaattatccctagcaaggaagttggcatcaccaccaagaccaggcgacgaggttcccccacgggcatgagagctgtgagtatcacgagactcagaggttcgcgccctagtcgcatacgcgtctctgctcggacgagatcggatatcaccatattcatccagggtacccgcgagggcgaatctcctgggactgtgcataccagactcagagtgagcttggttactcttgactatttcgtagaaccgatttgcttcttggacggttcgccactgattattgttagctgcgacgctcggttagagatgttttgagaatcctcacccagctgcgaccaacgggccagagtttacttagtcgctccaggtagacaagatttcgacccttttcttcctcggcccgtttgaggctgcccggatatcgctgtggggcaattgttccgtacatgttgatgtgagcggcgacaaagacgctgaagccggaatatggtgacatgacgggtgcaccggaggcgtctagtgcattgaggatacccccgatctgctgagcggcttcgaatagctgtttgattgtatcgggctcgccttgcgcatcgtcatttgtgtcgtggaaaacgtcggaatggggcttgaggttggataagaagcggtctcggtggagaaaaaggatgctgattgaaacagagagttagtatcgtttcctgaaattaactaaataaaaacaaatacctcatataataaaccagattgatgtaggcaaatagctccccgtacccgagtgccacgtgcgactgaacgctggtagctgggaaccggaccgttacatcctgaagagacctccattcatccagttcctccttgaggacctgccaagttaggaggagcggagatatagtcgagtcgtccgaagacaaagaagccaatgctcgtcgatgttcgttcgcaaatcttaggattcgtacgaatatgtcgaatcctcgggtgacgattgtgaggccatgctcaattgtaagacccttcgctagcaaacagtctttattcatatcagcaggcatcaatctgctggctggtgtatgattaaatgtgaaatctcgatcactgatagggagaggaactgagatctgggagaatgacagggcaaagtgctgacgggctccggagctcagttcgcagtcctgcgcaaagcagcaccagtaggttcggaccagttgttcgtattgtgtctgggatgcatggaactcctgaggattgtgttccatgctatcatctgccatcttcagaagggattgaatcatgtaggtcgccatgcctgatggttgtcagctagtgatctaccatcagttaaggattcgatacataccgctatacatccacgcttgatatggtcgcccagtgccccactcataaaatgagatcatcacgagtgactgggcaagatagagcgagggggcctcaagcacgcgctgggcaagattcttacgtgcataatcggcatagatttcctcctccccgagttcattgctgttcatgaaccgtacgcacaaggaaaggaccgaggccacaaagacagagtccaccgagtggacgttggatgatatgtcggagatcaaagaagggtaatgaaggaaattagtgattgggaacttttttctgtatgtttccactgcactgatgacggttgccggtgacagtgatgctatgggatcattggacaggtcttgagccacggggacattctcaggggtgcttctttctgcatctccaaccactggcgatagggcgaatgatgcctttcgttttcttggggtcctggatgtgacagtattgctccgcgtcctttgtcttgaggcgcggggatctgtcaaattacatccttggttcttggtcttcaagcaacgttgacagggcggttgcccttcatgaacacatttgacttttgcttgcctgcatagaaagtcagatgagacaataaaactaagacttcatatataaacttaccgacaagcatcacacgatattgacagcctcatcgagtgtacatacggggaagagtggagtgggccgtggtagaaaaagcggctttcaagtatcgtggggtaagttaagacaaactcgagcccatcggattaatgtaggagcgcaattggactaattcaactatttatgaacaattgaacagttggagacgttcatggatgtctgagggagcaagagttacacggatatcttagtatccgaatgtggttagcacgatcagctgacttggatctatgaagaattttgatatgaattttgatgattctgatttctcgttataattatattaatattgagtctctatagcggcaataacagtataagaaatcgctctaggcaacagtcaatgggggcgaattccttcaaattttggttgccactgtccactgctgcacccacgcattgaacttgtcaatttcctgctcatccgtggcccaggacgtcacaagccgaatcacaatttctccattatcaagctgttcccaaacatagaatcggaacctgtcctgcaggctccgaaccaattgttgaggaaggataacaaacacctggtttgtctccgtctccgcagccaacctatatcccagcccctcgaagctggttgagattttctgggccatctcattggcatgtgtggccagtgtgaagaacaagtctgaccggaagagctccatgaactgaactccaagaatacggcctttggccagcaaagcgccatgctgtttgagatggaaaacgaaaccatcggccaggtccttcttgacgacgattgcttctcccatcagagcaccggctttggtgccaccaatccagaagatatcggtcatgtcgaagatctcccgtagggtgagatcgttcttccttgaacagatggctgtgccgattcgtgctccgtccatgaagagcaggagatttgattgcttgcaaatagcggagaggctgctcagctcgcgttttgtgtagacagtgccagtctccgaggcattagagatataaagtagccggggtttggccatatgagggtagaattgattttgctggagcgccttttggagattggtgggcgtcattttgccgtcgaccgctggcacaaggataagtttgtggccggttgcctcgatcgcacctgcctctttgcaggcaatgtgacccgactccagagtaattacagcctcataaggccttaggcagctggcgattgaaatgaggtttgcagaggttccgctgggaacgaagaagatgtctgcctcgtcctcggtgcaaccgatcttgtctcggatcaattgccgggcacaaatgctgtattcgtcatttccataggtgacttgctgtgtggagtttgttcgcagaagagcttcaaggatttgtgggtgagctccctcgctgtagtcatccataaggctgtatgaagggcatgcgtcatcttggcgtaagcttgttgatggcatgatgggtatcaaattgcgaatttggttgagagcacaacaaacaatgagttccaaggtttgagctttaaagaaacaagtgacgaaaaaaaggaaagaattatttggaccagcactacattgtccataacggaaaagactcgggaataattttctcgggaatgttgccacccgtggatattattcccgagatttgtcagtaccgggaatcccgtgcgggcatttccacctgggcagttattatcaggtaaatttgtgggccggaacatggggtagcaccgctttactgcggaactccccaattgatgttaataggttccaattgagatacccgacaagacatgtgtgacgtacttcaaatttaaggcaagataggctcgagattagtgtctctgatcgacacccggctcccgggctcccgaacggacactctggaatcaaaaggacacaaatagtcagttgggatccccctcacggaataccccctcacgaggggtgttgtcatgaggggtattctctaagttactctttgcttctgtatcaccctgagaacagcttgggtgaccgagattagaactgcctgtatcacccgtggacggttgaaaggactgcatcaagtccaagtacaccgctatcgcgggcagatgtagcccttcccaacacccaacgcgtgcagggtatgatagcatggttcatactttcgaggcctaggcctcgatataaacagtaaacagtgggatccactccccgatgtgggttctcgaatgtcaaaagaaacaccagctttcatatttggcatggggggagaaatagccttagtttggggttgacgcttgcacggaggtcactgtcggttatgacatagccaaagggcgaatgaggaagatctgaaaaatataagcaagaagatgtcggcattagattaatgggcaagaaagaaggatacctaggtagggtaataaaacgacaatagcctgtaatattctcatataaagacttggcgagtcagataagctcatgctgggacgtcgccattgagcgatgagccgagcaactcccacttgtagcaaggatcggtggtataggtatatggctgccattaagaagctgaccacatactgattctctccacattaacgctccttcttgaagctaaactaattggcttactataaaacgccacctataagcgaagcgatgacatgagcctaatgggccgcacctactatttcgttcggttcctttgccaccgatcgtacccgaaatcctccccacatacaacagaagtaagaactgaatcacacttgatgttcagtgtgaacaggtatatcacgaaagctaaaaacacccgatatggccaggtagtcgatgaagccagtagccagtactatatacacattggactgagtccaccaaagacccgaaaaataatgtacaaaaactccggaaataatgcaaacagtgttccgatgctcttgaccaaaagaaacttaatcctcatgcggcgacgcgagatgcgcccgctcgtctgaatacccatcttccgtacgaagacgctggtagaggcggacccgccagccacggatgatcatatagcatgcaataacgccgaaaaacagacaaagaagtaaaacgaaagagaagataccgccaatgctgcggatagcatcgtatgtatgcttgaggacttgggtggtcttctgtgtttgggtgtcaattgcacccggtgacgtttgaccagacttgtcagccgcattgtctccttctgcgccattgctttcttggtaaatggtcgatgggtcaaccggaatgggtgacttccctctgtatccgacagacttccagtcgggggacttgcttcggtgcatttcggacctgcctaggacggtgccattgacatctactgcttcggcagatacccagtccaggtatccgcgggcaatgtacatggtttcaaaatcggaccgaggggtcttgccgataaagacggggtcgtggaattcgttggctcgcgcgtagaaattccaccatgcgacgtccgtcgcgccgttccagctgacccagaatgtggtcaccatgtttgtttcatcggtgccgtagactgacgccaccatgtcgggtggtgctgtggggcgaccggtgaattcgaatttgtacccgcggtaggatgaatagcgtggggaggtgaagttggcggtcatcaatagttctccgtcgccggcatgttcggaaatatatccctctttgctccagcaagtgaacacattgtcatttggaagcagctgggtattgccgcggagtcttgaaagttggtgatcggggcggttgtagcgccggatagctttggcggtcatgggcttcacgctggtatccaactcgacaaatagggatgacgacatattttcctcgttgaattcctcgtccgaggcgttattcaaaaatgagataatgtggtgcgtcccattagactccacgaatttcgcgtcgtgctgcttcgaaaaggtgaaatcttgcacgaaatcactatgtcttccacccaatcgccacatgatatttccatccatgcaggagatgaggtagatagtgttcgtgaaccggcatgagatcaaatagtccccaatttcattcttatcaactgagttgacatgcacataatcccagccagggtgtccctctaccggagaatacgggctgtaatggacggtctccggtaaaggaatgtgaccataagagtcccaccactggacaatctcggcagtgttcaaatcgatctcagcatacccgccggactcaagccaagtcttctctgtcgggagaccaaattcctctaggctaatctcatgagaaaggtagactgtgaccagcgcagtcttaccgtcgtccaggatgttgaactcgtggatgtcaaaagagccaagatctttccgcaaaggaagctttcgttggacatggtaatcattggtcaagatcattccatacccggtgtctatatttcgatcccacgagttttgcaagaccatcgaaaggtgtgggtcagggcctaggctgttgacgactttgaaatcgaagacgttccggttgtcgaattgttgcgagccagtccagatgaggcgctattataccgaaatatggtcagttgtcgggattctgtatcgcagggggttggtgtaaacgcactccttcactatcgtagatatggggaccgatctgatattgctcgtacaaggtggacggtggatcggggccaatgtgtaggtagggagcgacgaaccagtaaccggggctaacgcgctcgcggttctcgtagtggacattgaatttcactgcccggacatcgggcagctgaagaacacggtgttagcgcgatcgagcaatttctgggatatggggcacggactgtaacgaatgacatgagatcatcactggaatattgcgccagtgcggtttggcacagccataacagcaatgaaacgctgaaaagcagcattcttcaaagagcgtggtatagggaagtcatgaagaagagaaaaggaaaggggactatcgctggggtctagacaaggcaatgttatgtgcggatcgaaggagacgccaagacccgtgggcgaatggcaggggcggaagggccaagcaaaggctgttataattggatcctctgacgccgcgagggggtttgaaacggagaaatgtggtgctttcttcccgtcaggcttaatgaagatcttcaagtggaccgcaaaatccgtaaggcctcgtcagcacttcttgcctgttggtaatgtcaccgtctatacggcaacaaccttggaaatgaagcatcaaattgttagcattggacttcaagtgtttagcctcacgattttagctacataagcataattctccgaatctttggtatgattgtccacatacctggcacttccataacgggaagatctgcatttccgaggggcttaccgccttagatactgccagactgacttctatagatgcgacatggtatattaattgaacagtacaacgatagtgactgttctgatgtgttgactattccatatgataatagtggcctagaatggatatgaatagaaatggcacaaatcatatcttttttatgtacagcaggtctacccaacccagatattatacagaggaagggaaccacactatcttacaccaataaacatgaaccgcttcaaaaagagaaaaccaaaaagccacataccccaaaaatgcatgctatgcaagtcgctccaaggaccaaaaagagaaaacaaaagacgagctgtccactatcgtcaacagcacctcactcatcaggatcacgataatgccaaagcttcttccgctccgcaacccaccaaaggccaaccttctcggccttctgagcccaatcaaaagcctcaggcccatgtttgaaatgcacctccgcagcaagcgaccccatagtccagcccgtcacaggctcaagctcgtacgggtccttattcaagtccgtgaaccggtactcgaagtcattgttcaatggtaggttgaggcgccagggcacagcagcggagccaacactcagcatcgagccaccggcattaatgacgcccatgttccaggcttcgcggccattgtgcgaggtgcggtatggcctgatgagggactggccctcatactcgttcatcagatccagagcgatttctgtgtcgtccgcgttgagggaattggtgttcacgaggagatcgaggatcgtggggaggatggatacggcgctgccgttgacattaaggtgcatgcggggtaataaggggtggtggaacactagaggtacgcggaagttgctgacgtgtgggttgtggtaggttcctgtgacgggacagtcttctccaaatgcttggccgctgtttcgttggttagaggtcaggctggtaaggtgggttggccatttggaagttatacgtactggtctcccacgaagaccgtcaaggtctcgttggcaatacctgcctcgtctagcattcccatcaactccccgagccaagcgtcgacgaagcggtttgcgttgaggaagtcatccataagttcgtgttgtgatttgtgaagatcaccgaaatattgatctcggttccagccttcgggtgtaccccaagggtggtgagtggtgctggtgaaatgcgaaaggaggagtctcttgttctgacgaagtgtttcgtcgatcatgtctttgatgtaggggcgggcctcagtttcggcataactgggccaagttagtatctacacacgaagaacagctgcaggaatcctgctcgacaacgtacccgaaatagttggtcttttccatatcctcatggaaatatttcgcgtcctccacatcaatgtcttctgaatacaatgtctgcttgaaaccgagcagatccataagccgagtttgtgcctgaaactccccagtgacagactgcgcatagatggtttcccactcccgttccaggtgaccgttggtggaatttccagagctagaggaattctttcgctggttgaacagatccatgatgtgcatcagacacggctggtatggaattatatcattttcatgcataaagtccaccgggagcggcccaagaccgcagtagttgacaagacgcgatttagcagagagagtgctccccgataatatcccgtcgaagctgagaccacctagcccggaattcgttgagttaactgaggagccaaagccggattgctcccctgtaagcatctctgccacgggggttatctgagacagtttgtcgtgtagatcggcttcgtcctcttctccgaataattcatacgattcgcgaatttgggtgtacaagtgggaatcatttttgagcgggaacagatccttcctgccgctttccaagaacacaaagacaatgtggttgatcggaatgggatggtccttcagagcctcttgcagagggccaagtggttccagatcaaggttgcttatcctcatgggatcgtgaacaggattatagaagtaatgtcgcggttcaactgtcttgtttctgacttccagaatcggattcgttttcgtctctcttgaacacgctttgaacggtcgaattagacgcctccaagctcgtttcgggcgcgttcgaatcgagattcacaatccatctctcaaacgcagcaggaagagggcctcgcgcccaggctggcttattatttccataggcagtgttacctgagtcgtccaatgtgggtgcccaccccttgtagtgcccatttgcaggctcccaatattcctccgccagcaattcaggtaatggaaatgtttcaatggtcatccgacgagcccgagactgctcaccgagcatggtgaagggtagagctcctgtcatatgattgtatgggattgacggccggatcagccagagtccgatcgttattccggtgcccacaagcgtccacaaccgagatctattcgataccaaacttctcagatccgaggggcccgttaacatggtgtaagtcttggtgtctccgatattggcgagtgagcatagccagcgggtcatgagattccagatcccttgagccgaaagccaggaagccaccgtgatgactgttgtagtggcagccataggcaccagcccgctcaatattaacttcattccctgccgactggcgcccacggacctggctgcatcccatcgaatttcgctgccggtctgagaatagaaactaatttgcgaggacgttgctaataaatcaatgcatctgagggtaaaagtcaacatagttgtccatatcatttacgaaaaggtgaacccacgcgacaatcgctgaaatgataacggcaaccactgaccaccgaccggatgttatatataagagaatccatactgcaacgaataagagaacctcctggataaagaatgttggaaagtagagggccaaaaggcccaaaggaagagaccgatgttgatatatatgaagcaacttggagcagagaccggaaagcaccagaatagacaaaatcaagcgctgcggatgatgaaaacgagtgacgatcataatggcccgacgtaaaacgcggccaacatgaggaatctttcgagacggactgtttttcaatccgtttatactcactgtacaatgtaagggtcaggaaaaagagggaaaagacgagaaaaatagggagttaaagaaattgattgctcgcgtgctccacaacagcatactatcggagttgtggcatgagagcgccacatcgactggattggattataattataagacagccggatcgtgcgggtgcactagccaacacaaggtggacctgagccagggggcctttgcctcagccttggagatgatgggtgttttgatgtgtagtgtgattggtgatcttgtgtactatttttttcttcccgacaaggatcggcggtccggggaaatgtcattcagccttaagaggtcacattagcattgtcttgacattgcaagttcaacgtattctcgtatggaacggagtgggcctgtgtctgtgtatccgaatacgacgagccccgtagccctataggcgttcagggggaacgggtccccggggacagccggaagtatttgttggaacattcgaacattgggactgaaatccatatcctctaagcgaactgctgtatcgacggtaaccggagaagtgaaagtcttggctgatgtgttttgggtgttgcctgcttagccttgtactcggacctgttggcggcaagcgggcggcaccgagtgcaacacatcccacacacaccttggcacttgtgtatcaacatattggaaatcacatctagaatccgaggacctatagatggacgataatgctcctttgaggccagaaaggatttccatttgtaacttcgatgtacaatggaatattttggaggtccctctgtattctccacccctggcccccggggccaagtgttagtcatcctctaatacgaacgtgagcgctcgacttcaacgcttttgctctaagtctgtggacgcgaaacttgtgacacgttacccggagaaagaaattgacatcccaaaccggttatatcgactacgttccccaaaatggccgaggtagttggtaccgtcgcggcagttctacaattaacccaggcagctgcgacaacagctctccaagtgtacgagttcttctccgttattcacaatgcgccccaagagattagcatgctgagtagagacgtgcgcgcgttttgcaccttattccataatctcgaaacatcattaggcagcgccagtgtgaaagcggctattgatagggatgtggagatagaaagcgcgctgaagacattgatcgatcctatctccaattgccgtgctgcgctgagtcgaacgaaagataaactccgcacctcagagcagatatttcttcgcttcaggtttctagacaagactcggaagctggccatcccatttcagttgagcgattgcggatgagaagcgggaatgtgagctggttttttaagcggaaggaggtctttgcgtcggcccttgagttggaacgtacgaaagccacgttcggggatgctatggggagtatcacattgtacgttgcatgatggaagtggcaagagttacttcacttcatttgctttgatattcgttccttgcattccatgtgtcagtaggaatatatggcttatctatggcaggcttctggcacttaagcagtcgactataaagagcgaaagcagggtcatagcccaaaaccatgactttaacgacgacgcgggttcagcgtcaagcagttatgctacctccattgtcgacgtccagcaagatgaatcaccagccaagaaacccatagaacgttcaattgcaagaagggaaaagccaaagaccggcatccaaaccagaatcaaactagccagagaattgaagatcgggatcgatggcaactcaaagtttgtcgtgaaagcagtcgtccaacatgtggacgtggacgttcggggtcgaaaaggtagaactgcactttctcacaccgcagaagcaggaatgtgaaatcacaaagttactacttgaagcaggcgcttcggtatcggctcgtcagtacagtgtcagtggctgggccggaggccacaatccccatcattgcagtggaattacccccttgcactgggcagcaagaaaggggcataagcaagttgtcgagctgctcttgcagtatggcgccaacccaaatgcgaggagaacagccggtcgagccccaatacaagaggcatcttgtgggaatcatattgaaatcgtcaagctattgctgtcgaaaaaggcagacgtgaatgcgcagagctactacgacgtgagtcccttaccttcttccgctgggaaattgttctacagtgctacttgcatatcctcttagggctggacatctttgcacgaggctgtgtttgctaaacgcattcgactggtgcagctattaatcgccagcggagctctcctaaatgttcacttaatatatcccgaggagaaagcacccctccatttcgccgtggctttgcaatcacttcggatcacgaaaatgctacttgaagcccaggctgatcctaatgtgctgatggtggaagatataacgcctctgcatttagctgctgcggcgggatggatccctggtatcggattgctcgtgagcttcggcgccgacttggatgctagggataccttcactcacgaaacacccctacacaagtccgcacgaaaccgccaagttcgtgcaattgagaagctctgtggattaggggcgaaccgagaagcgaagaattgtgatgggcagagttatgcggatattctggaatgcgcaacagaggacccaaaggagtgggccgtccacaactctagagcctcgtatttcaggcaacagaatgactcggcgcgcccctgacttcatattcctatacttccaaggttactgttggatccactttcatggaaaataagtggaaatccatggataccactgtaaggctcaccaaggtatcttccacttcagtaggtgtattgggccgctaaatcgggagcggtacaactaactgggaaagggaaggcacagatctgtatacgccgtctagagctataagagtgagccataaaatgaacttcttcctggaattcgaatatcaagtcgtctctgcactgctactagctagctactatctcattatcaatacggagtatgaagtacgcccccttgtctcacccggcattacttttgcagatccctcagagcaagcaccatcttcagatcttcaaaccgaacctcacgccctttggaccacgccaagagaccggctgtcttgatcacattcttgatctggcgaccgttcaattgcaacttggctacctggtcaagttgttcatccgtgagggcctcaatgttcaatgagcggcttaggaactgtgtccaaacctggcgcctggattctgcatcgagctccctgtaggtgagggaaaggtggatccgagattcgaaggcaggatcgatattctgtgtacggttggtggtcaagaagagaataccctgaagagaaagatggaagatcagtaacatgtaacttttgagtatctttcccacatatcttccggccttaatgatccaaaggttggaacttactttgtagtattcaagcattctcaagaagatggagacaagctcattgcgattgagattgtttgaatcacgggcttccatgaagacatcagcctcatcaagcaaaagaacagcgccccatttaggaaccagctgcaggatgctttgcaatttggtttcgaactctccagcgtcaactccaaggtctcccgcactcatgacataaagaggaaccctcatgacctcggcaacgctttcggcagtaagggtctttccgactcctgggggaccgctgagctgcataatgaaaccctggccttttccccgaaggacatcgtcaaatgcatccactttcttggattgagcctttgcaacggccaatatcacctccttgagcccttcctgctcgcgcggtaggactagtgactcaaaggccttatcatcccactcaatgtctctcagatgatccacgtggaaagtaccccattccttgtcattcagagaatatccatggagcattggggtcgcgatgaggcattgtgcatcatccaattccccgtcaatatcccttgctgaccgcatgcgagaattgtgctcgttgtatgcctccatgtcaatgatgacgcgactcttggaattgccatcctgacttttggagtccgtgctgcttgaaggttcataggatttgaaatggtaccccttgtacgcttcccacttcttgccccgtgagatcaacaactcttggacagtatccttttcggggtgatatctgagtggatagataggcagcgaggtaattggtgtagtgcccgggaaatagggtattgtaatcaacgaggatatgtatccgaacttgcttccgtcaaagtcaacgtattcgaccgcgaaataatcagttgcggatgcttcaagttccgatgatgctcgcgcgaacgaataggcgcgtagtgctccaccactcgaagaaaggaccacaccttgaggttccaggatcgtccaagccaagtcgtgagtgatgacccctttggcaaccaggtcattcttgcggtcaatcagatctctgagttcctcatccatgatacggtagaacatatccacatgagccttggttgtcgggtcctgctcttcatctcgcaatttggtgatcgcttcccatcgatgaacaaaaggccggaaaggagatgtgacctcgagccgcttcaaggtcgttgtgataccaggataatctgtcagtgcctttttcaagaactctttgagacgctcgctttgcaccacaatggagtgaatggacagactcctgcgtccatcgtagcatttcttttttctcacgagaagtgcgtattgtgccgactctgcatcctcgacggtatcaggcaagtcggcgggtacttctttggtccatgagttcatgccacaaccatcgggcattgtctggtagagggtgcggaaatcacagagggtgccagcaggctcatactgtatatccatggcctcgggcattgtgatactaccaccagtagctttgatcattagcatgaggtgaatgatattctagtgtcagagatttgatagacttaccagctccatctgagatatcgatcgccatgatggaagatggaagatggaagatggatgatggatgatggatgtcaacagagaattggaaggggaagaaaaaagtttcagtgagaagaaggcagagggagactcaagtactcagagaaggaaccaaggttggaaggaattacccttagatgtttgcctacgtcccacgtcttatgttactattacaccttcttctacacatgtgtttgttagtgtttctaagatgtactagaatatcactggtattattcttttattccaccattcttggtgagaggcttaggtgatacctacatatccatgggtgtacctaggtagttatagacgcatcgacattatcttggatcaccattggggtacaataaagagaactggaaaggtaagaaaactaggtagatgcgaagtgcaataatgcgttatgttgtgcctatgtaccttttgtatggagttgctatataaaagatacctagtccttacaatttgctacccggcatacaagttgagctgcttggcaagattatagaaagattatagagaacatccttcgtacagagccctaaacgccttaaaaggtctctgattggacccagacactataccaaggtgtctcacacctggacactgattggtcgtgggcgttcatcgttgacctcgttggcaattgcggatctcccttgctccacacatcatgccatacgatctttcaagttgtgagagtcccaatctcccagggaaagaaagagaatctttttgtataacatctatgtctcatcaatgcatcaaacacacttccactctatctagaaatattctatctagagatgttctagttatgtatgactttacgctagattcgcaatgagttggccttcggccgaaaagttcccaaaccccgaacaaaccccgctaactcattccgtgtggaaagccgtcagacgagccctgataacttcctccgagtcctcagtgtccagctcactgagcacacccgatccaacatcataaatcaggccatggagttggagccctcgctcccgaatcgcattcaaaacaacactcttctgcttgacaatgtttaagccctcgcgaacgttcaattcagccagtttgcccgccgcctcttcgctaggcatggactgcagaagtttaaggttgcgctcacgcagctgacgaagggggaacagccacgggtccaaaatacccaggttcttgttgcccagggcagccgccacgccaccgcaggatgtgtggccgcacaccacgacgtggttgacgcggaggtattgcacggcgtattcgataacggcggaggagctgaggtcgccagggtggaggacgttggcgatgttgcggtgcacgaagacgtcgccgggctcgaggcctaggaaggtggtttccgggcagcgagagtcggagcacccgatccacaggatctgcggcgtttggccggaggcaagggtggggaaaagctcgggttggttgcgggctgtctgtgcagcccattccttgttcaggcgcaggcctgttgcatatcgatctgtgagagacgcacgggcgatgtcagtctgtgtctttggttttgggttttgggttttgggggacgtgtgttcaggccaggctcgagggtgattctgcgttagtgtcttgacgactggcgcaggataggagtatggatgttgagaggggcttggtgtgaggtgctgacagagcggtcatgctgtgcgtcactcgagacagggtcatgggcagggaaccaggtgagtcccgggaatcgccgagtcccccgctgcacgcgcaatgagtcccgttctcccggtgagtcaggcagttcgcccggtgagtcttgcagcactcatggagggggaaaaggaggtaggtgggctatgatagggattggggaagggaaccgccgactgagggagaccagaggactacacagacgattagggagataactaatcccaacaaccgatgcgtggtacttctcacagagctccgacagtttcgggttgaatgaccgataagagagaaagcgggaaaaactgacggggaagttgaattgccaaggacgcgcataaacactctcacacttaccttcagacatgatggaatactaatggagagagatacagaagaaagaaagacagaagatatgttggggactatataaactctcaagaggagtaaataaagagcggggagccaaacggtgagtccgagtatcacagaacgggcagatccgcgaatcgggctttttcgtgaagaatcgaacgactccgtactatcagggttgtatacaaaatacaagcctcgtctttgatggctcaatttactacacattttttggggagcttggaaatgcaattgcttttataaaatcagaataagtacatgagatctttttataaatttcttaagatgtaccgccacggccaccgacactcaacagagtcttcttctgttcctcactgatctgagcagcaggcagagggcgggctccagcaaccgtcggcgcgggcaggaaaccggtttggacaaggtatgaggcatataagccaactaattcctcagtcacgccagcaccggctgatgcgtcaacgcccgaccaggtggcatcggcacgcagagcggtcgctgcgttcacatcatccagttcgggggccttggtgttggagggaaggtctgaggtaacgaagtggtaaaggggcatactaaataaggtcagtattcatccgttaaggggctgagcaaagtgagggacttacagagcatgctgagactccttgtcattgtgctcgccgtcgttgacatactgctcaagggaagtagaccaaggcacgtagtcaacctgagggacattgtatccgtagagctcgagcgcaccaaggaactggttaaagcgcaaacgagggtgtccggtaacatgggcgacgttgacgcctgtggcaggtgggtggaaggcagtggcaatgacaatacgagccacatgatcaacaggcaccatgttcacggtgttgaagatattcgggcgaaggccaatttgaatgcagcccttaagcatacggatgaggaaatcatcagtattggtagttccggtgaccgaatcaccaagaacatatccggagcgaacaatggttcccctcaggcctctgcggccggcctctttgacaaggtattcaccggcccatttgctttgtccgtaaccggttccaaggccaactctgctgccctccatatcgtcgtcttcgctgataccatttccaccggcggcgatgatacgttcggattcttggacgtagtgatccttatccaaagcactggtcgaactgacaaaggcaaactgcttggcctttccgctggcgcacagcttgagggcatcaattgtacccatgacattagccggtctgagtgtcgcataggggtagacccagtggacaagggctccgttgtgaattacagcatcgacgcggttggtaaggtcgtcccatactgactgggaaagaccaaactgcggctttccaagatcaccacagacagcttgcagcttggcagtccacgcttcatcccagaaaccatatgcgcggcaagtggagcgaagtcgctcgagtgccagctcctcggtctttgcccgaaccagagccaccaccttagtggaaggagacttgcgggtaagtagatctcggaggatatgtgcgcctaggaaaccagtggctccagtgaggaacactgtgggttcgctagtgagcatagcctccgtacgctgagggaacgtcttaggcaattcattcacaagctggacggcatccttggagtactcgtcgtccggctcattggcagcctgcacagctagagtcttgtcatcgctagttgcgaatgattccattgctagcaggcggtcgatctcgctggcaaagcccttgagggtcgggctgcggaagatagcattcatactgatatcaataacacgccacttacggcgaagctcgaagaacatttgttgtgcgaggatactgtggccgccgagatcaaagaaggagtcatccgggccaatcatgcgagaagtcacattgggaatgagcttggcccagacttgagccagagtctgctcagtttcagagagggcctgcaatgcagacgaggcgcggcggggtgcagcggcgctcagctctgcagtatctgggaaaggaagcgcgggcttgtcgatcttgccgttcgggttcagaggcatgcgcttgaggggaatgataacggtcggcactgcgtatgtagggagcttagtccggagatgctcacgagcatcatcacggagaggacggaagcgtcgcaacagaccgaccataccctcggagtcagagtcatcatccttaaggcccttgctctccaaccatgaggcccacttgttcatatcaggtacaaagtagctgaccaatgtgggctcctcgtctttatctcttcgcaccaaggtcacgttctcacgaaccagtgggtgctgagagagatgggtgtcgatctctccaagctcaatacggaaaccacgaatcttcacttgatcgtcggcgcggccagaacattcaacatctccagatggcgtgtaacggcctaggtcaccactgcgataaaggcgatcacgcggaccaacgtagaattgacgccagggctcattcctggattcggcttgatctttttccgcccagatctcagggttaacaaaccagttgttaaggaacttcttcgcactcagttccggggagccaaggtagccctctgcaagaccccctgcgcgaacatagatctcgccgacctctccaatagcacagagacgagtggggtcatagcggttgacaaccagcatctgcacatccaacattccgcgaccagccataatgacatctttcatattgttcaggtagccctcgttgctggcgtagctagggatttcatagtagctgacagcacgctgggtctcggttgttccgtacatgttcacaatgctgacattgggcgcaagtccctggagtgagcggcagtctcgcttaatcagaatgtcacccacaaagaaggcgtggtgaagagcagggaactgggcagaggcaccaccgacaaggatttgacccatagcaggcgtaaggtgagtaatggtagcaccgtacttctgcatccattcggcaagcttttcgttttggatatcctcacgagcgggcaccaggagttgagcacccaagaagagcggggtgaaaatgtctctctgaataggatcatgagcgatgccactcagcatagtaaacttctcgtctggggtgagtttgaaagtctcagacatccaagggaaataataagccagagagaagtgtcggccacgaacgcccttcggccggccttccgagccggacgtgaaagacagggtcggaatagaatcaggaccaacgacgacaccagtaggcttggacttcagcgcgacgtcgttggcgaagacatcctggccatttatggatccaccggcgagagttccatcatcgagtagggcaagtgcaggaatttcagtgcggagctcaagattctcgtcaatgaaagtacgcacgatatccgaaagttcacctgcatcctttgtggccttggcaatgttcaccaaagcgcggggacgggcaacatcaaggtagatgttctgacgttccggaggataggcagggtcaataacggagaaagtcgcaccggctttcaaaatgcccatgacagcaaccaccagatccacaccacggtaggcatagaccatgacaacctcgccccgctgaatgccagatcgtactaaatgatgtccgagaatgttggacgcctcattgatttggcgataggtgaactcgcggtgaggggagctgcttgactgggtttcaactacacacagcttttctgggtggcgttccgcattggcggtaaaaatgtcgtggatggcaccacggaagttagaccagttcaagttgcacgttgggtcgggcaagagtgcgcgctgatcttcggtcatcaagtcgatacgtccgatagcctcatccggattggcggcggcattgctagcaatactggctagttgcttcaaaatgaaagcaatacgagcacttgagaaaaggcgctgattgtagtatgcgcccaattcgacctcagctgagccaggtgcaacgttaaccaccaaatcagtagtatcaaaggtgttcgcagggtaatcttgcgaggaagcaggggcatcatatgcggcgaatcggaagaggactggggtgcgttcggacttggacttctcttggatgtacgagcgaaggctgcccaagggcacgatttgggaagagccctccttatatgcctgcaagaccattagcagtaaacactacggcaagaaacatatataaataccttgtctactttggcataaagctgggcgaaagactccgaggtatcaatgggaacccgaatgacgaatgcacgaccatcctcgttggagtttgtgcccacagcgatgtcctcgtcaccagtcaaccgcgctaccaggataataaaggcagtcaagaaagcaatgaagctggatgatgagcctgtaagcttcgccttggggagttgaagagactcgaaggcttcaatgactctcttgctgtcggtcttttgtgtatcgggataatcgcgagtcaatggagagacagtcaggttcttcaacctttgtgcccatgtctccagacggtcctgcaaagaggccgttcccacagccataattgcagtatgtttgaaagagttggagaatgaaagacacgatgactcaatgttaaaattacccccccatagtggaaaagtccgatctcgccgctatttctgccaatgagagttgaggcactgattagctattttccccacagagtattcaccgccttgtacatggtggggtggcgtcggagttgaggtttctccagtccaaggcggcacagattggcagaactaaggagttgtacggagtacaaggtctggttgttcctctttgtctgattcactgagtgtttttggcattgagactactatacttgccctagacagccactcttgtggtgttgagaatagaagcccaaccatcgcacatgtctttttttggtgaagagatcaaggcatatatgtacagcatatgccggtagttccaagctatgtatgtatgatttagtggaacatgcgaaacatgtggagcatccctgatatatatatatcaccttatagagtgttcacatagctccattgatctagatcaacgtctacagagatataaagtgtttgtaaatcactgctagtagttgcttgtaaatggacacaaaccctacataggggaatagacgtgccaattaccttgaccatgataatccaaagagggaggagcatatgttgaacatatacctggttaaccatgaggcttcatattccagagcctctagatgttcacgggtcactcttccgatgaggtcataagggttccaatggatctatcgcgaatgggttggctgagtcatcatttgatcttcgatctcagacaagtaaggaatcagcatccccatcctagttcgaaagactattatcaagggctctattttgtatttggctcagcattggaagctagggtcaggaccagcagattcagataaaggtgcgttgagttgccttcatatctctcatcattttcttgccaagactgcattggccaaatccggtctcgttcgaggcggagtttcaggagaagtgtcgcggtctgaagccacacgtgtttcttcaacttttcacgggcctctatacagggcctttggattgaatgttggaaaaatgattcctcacaggagtacagccctcctgtctgtaattgtcttcgtcgcgcttttgcttttcattttctcgtcctctccggtccctgataccggggagcaatcagccacaggcccggccaagtttgtgcccacaccgaaactaccctcattaagcaacttccacctgccctcgttccgccctccctcgcacgagcagcccgaagaacagaacaacagcacacacggcgagtcgaaatggtacagcacactcgagtggttgaacccattctcctctgccatcacgttggatgagaatcgctctgtcctccctccccttcgcgaacgtcgaccgatctacacgtactacgatgcgaaatataaccccaacaaagccaatggcaaggatctcaaggatttgcagaatgccgatgcggaattgcttctcgcatggcgtcgggcatggtttgctcaaggattcaagcccgtagtattgactccgggcgatgcgatgaaaaaccccaactatgaagttgttcagaagtggaaactcgcgcccaaaacacagaacgaggtgttcgcctggcttgcgtgggggcacatgggcaccggcttactggcagacttccactgcttccccatggcacgttacgatgatcccatgctctcatacctccgccgtgggagtgtcccagaatcaattacccgattcgaaaacctcaagaatggcctctacgcggcggacaagtcgcggatcgatgcggccgttcagagcgcagtcctgaaactcgatgataaaactcagtcctttgtcgatctaattgcaccggaatcgttcaaggtcgagccgccgaatgctttggcattttataaatctgcagccatcacctcccgctactctaccgtgcatgaaaagatgacccagaaccctgcgagtggtcagctggctcttgtccaactgattaatgcccacctgcacaatcacttccatagctccttccccgccggactggccgtgctgaaaccgttccctcagcacactaccgcgctggtggaacctgccctgcgactggcgaaggctcttattcagtgccccgagtcgcccattcccgactcttgtccacccaatgaacctgattgtcggccgtgcgggtctgggtctgcaaagcaacccatgcgtatcagccaaccttcgacttataaaaacaccaccttcttgttcaccatcggtacccttcctcacccctacactcttatcagtctgcagaagaactcagaggagatcacaacaccacaggttcgccgggagaccgaccgcgacgcatggttgtctgaggtgaccaaggaacaccttgggcccgaattgggttcttcataccggggagtaattttcaagcaggttgtcgcaggcgaagatgctgtcgggacttctttgtggatgacagtggaatctcttcctgcacaggcaggtcagagtctcccctcggaactcttggatgagtttgaatggcagtttggtttcaagattcctcgtgggagtaagattgatcccgcaaccgagaacgacaaagaatccgccaagagcgcgcaggatcgcacgccaagcgagcaaggcgttggcaaagaatatgaactcatccaaaaggcccgcgaagtaattaagaccaaggaaacgaatcgcatcggcatcaaggatgttgttgaggcttggaacctcgcggacacagaggtttggcgctttgtgaaggcctatcggtaagttaccttgtctctaacatctcatagactcttgttaattcagttatttgcagggcccgaagcgtcgttgaacgtcagaagtgggaagaggacgagaaacctttcgcaggctcgaggcagtgagcgagcatttacgggattaccatctacgaaccattttttttatatatatatgtattgtagctatttctttattttcctccttccttttgacgtaattcagatatagaaatttcaccaactggacaataactatcgagataagtagttaataagtaataagtaaggagtagtaatcccagcaaaacaacgccaagaatccgatggtcacccgacttctcatcggactgtggcgatccccgcaaagataacggaaagtcccaagtgggcctgatatcgatctctggggaactgatctcatcggacttcccctccttcgatactaacctctcgaagacttcattttagtaatatattcatgttgcggacaagctcccctaactcgcccgcaactcgcccgcaactcgcctcgttataaaaccaagatgcacacctgaactcgcccttgaaagcctacatctaactatcgccacaatcgctacatctccaccatggcgcccggaatcctagagacgggctccacggtcgcggttgagaagccgagcagcctgtctgccttgaccgaggactgggatgacactattcggttctatctcaacggcaccaaggttgcggttgatacgatcaacccggaagtgactctacttgaatacctgcggggtattggtttaacaggtacaaagcttggatgtgccgagggaggctgtggtgcttgcactgtggtgggtctcagtcaactatatcgggttatgcacctagtgctaaccagagggttatctggtcaataggtcgtctcccatatcaatcctacaacgaagaaaatctatcatgcctccgtgaatgcctgtattgctccactcgttagcattgacggtaagcatgttatcacagtcgaaggcattgggaatatgaaggacccccacgctattcagcagcggattgcggtcggtaatggaagccaatgtggtttctgcactcctggtatagtcatggtacgcctatgtggcccttttgcttgattcgcttttttggagggaatctgaagctgactgttagcttcaagtctctttatgccttgctgcggaacaacccatctccctcggagcatgatgttgaagaagctttcgatggaaatctttgccgctgcacgggttaccgacctatcctagatgctgctcagagcttcaactcgacgaacaactgcggaaaggcctctgccaatggtgggtcaggctgctgcatggagaaaaacggctccggtggttgctgtaaagggtcttccaccaacactggagagaacgagacagtcgattacaaattccctgcgccggacttcaagccatacagttcagacacagagttgatcttccctgccgccctgcggaaacacgaataccgacctttagcatatggcaacaagaagaagaaatggtaccgaccagtgaccgtcgagcaactgttgcagattaagaacgtccacccgggcgccaaactaattggtggaagcacggagacacaaattgagattaagttcaaggcaatgcgatacgcggcctccgtctacctgggagacatccccgaattgcgacaatttaccttgcacgacgattatctggagattggtgcaaatgtgtcattgacggacctcgagcacatctgtgaccaagcggtagagaaatacggcgatgccaggggccaacctttcaaagcgatcaagaagcagttgctctacttcgctgggcgacagatccgcaacgtcgcttccccggcaggtaacctggccactgcgtcgcccatctctgatcttaaccccgttttggtagcaacgaacactatcctcgtggcaaaatccctcgaaggcgagactgaaattccaatgaccgaattcttccaaggatacagaaaaaccgccctcgcccccaacgcaatcatcgctagcttgcgcattccagccgcgaaggcacagggagagcacatgcgggcctacaaacaggccaagcggaaggacgatgatattgccattgtcaattccgcgttacgcgtgactctttctgagaccaacgatgtggtcagtgccaatcttgtgtttggtggcatggcagccatgaccgtctcagcgaagaatgctgaggcgtttttggttggcaagaagtttacgaaccctgctaccctggagggagtcatgagtgcactggagcaggatttcaacctgccgtttggagttcctggtggtatggctagttaccggaaggctttggctctgggcttcttctacagattctactacgatgtactttcaggactcgatgtgaaggcttcggatctagatccagatgttgttgctgagattgagagagcaatttctactggatcaaaagaccttgagacctccgtcgcctatcaacagaagatccttgggcgagcaactccgcatgttgcggcgttgaagcagtccactggagaggcccaatacacggatgatattcccgtgcaacagaatgagttattcgcttgcatgcttctgtctactaagcctcatgctaagatcctcagcgttgacacatccgctgcactggacattccgggagttgtggactacgtggaccacacggatctccctaatcctcaagcaaactggtgggggcagcccaagtccgacgagcttttctttgccgtggatgaagttactactgctggtcaaccgattggtttggttctggcgactagtgctaaaattgccgaggaaggtatgagggctatcaaggtcgaatatgaagacctcccgagcatccttacgattgaggaggcaattgaggcggaatcttactttgagcactatcgctacatcaagaatggtgataccgaggaagctttcaaacaagctgaccacatctttactggagtctcacgaatgggtggccaggagcacttctacctggagacccaagcctgcgtggcaattccaaagccggaggatggcgaaatggagatttggagtggtacccagaatcccaccgaaacgtgagtagcaatattcttgactatttctcatgcggaatataaactaatcgtttacagacaagcctatgtcgctcaggtgacaggcgtatctgcgaataaaattgtatcgcgcgtgaagcgacttggtggtggcttcggtggcaaggagtcgcgatctgtccagctggctggtctttgtgccactgccgccgcaaaatcaagacgacctgtgcggtgtatgctcaatcgtgatgaagatatattgacttccggtcaacgccatccgttcctctgtcgatggaaggttggtgtgaccaaaacaggaaaactccttgcgcttgatgcagatgtatatgccaacggaggtcacacgcaagatctatcaggtgccattgtggagcgaagtttgtcgcacattgatggcgtgtataaagtaccgaatgtgaacgtgcgtggccggatctgcaaaaccaataccgtgtcaaacacggctttccgtggctttggcggtccgcaaggcctgttcttcgctgagagttatatatcggagattgcagatcacctggatattccagccgaagagatccgggccatcaacatgtacaagccagatgatacgacgcatttcaaccagtccctcaaggattggtatgttccgttgatgtacaagcaggtgctagaggagagctcttacaaagagcgtcggaaggctgttgaggagtacaatgcgcagcataagtggtccaaacgtggaatggcgattgtgccaaccaagttcggtatctctttcacagctctcttcttgaaccaagcaggggctttggttcacatctaccacgacggcagtgtcctcgtagcacacggtggtgttgaaatgggacaaggcctccacacaaagatgaccatgatcgccgccgaagcgttgcaagtgccgcaggcgagcgtcttcatttccgagacagcgaccaatacagtggccaatacctccgcaaccgctgcttcagccagctccgatctcaacggctatgccatattcaatgcgtgtgaacagatcaacgaacgtctacgtcctttccgtgagaagatgcccaatgccaccatgaaagaacttgcccacgcggcttacttcgcccgtgtcaacctctccgcacaaggatactaccgtaccccggatatcggctacgtatggggcgagaacagcggccaaatgttcttctacttcacacaaggtgtcaccgcagccgaagtccagatcgacacactgacaggtgactggacgcctctacgcgccgacgtgaaaatggatgtgggtcacagtatcaacccctcagtggactacggccagatcgaaggcgcctttatacaaggacaaggtcttttcactaccgaagagagtctctggcaccgtgcctcgggtcagatatttaccagaggtccaggcaactacaaaattcctggcttccgtgatatcccgcagattttcaatgtgagtttgttgaaggatgtgaagtgggagaacctgcgcactattcaacgctctcgtggagtcggcgagccgcccttgtttatgggtagtgccgtcttctttgccattcgtgacgccttgaaggctgcacgtaagcagtggaatgtgaatgacgtgctttctttggagtcccctgctacccctgagcgtattcggactagctgtgctgatccgattattgaacgggtgagagtgcaacccaaggagggggagaagagcttctttgttgccatatagtggctacgacttcatggcctacgatttgtatgagattacaccctgtattggagcttatgtttagtatattgtaagacaatcaaattgaatctgttctatcatgtttacatcaatctcccgatgtgttgtatgggggtgttactctagactgatgtttaacacgactcgcagatgggaattttgattttgaaatcaagtggcattcttgattctaaactaaaagcgctatctttattggaaattattatgacagaacaccagcccatatagaaacgaatgaccaggtcaaatacattgaaatgccggagatggcaaaaggagagagtacagagtatatgttctctgcagaaaagcgaagatcagacgaaagatggaggaagacaggattatattttccgtcatcgcttcacatcatacacaacgtagctacttccccttagatcaggacctgagtccgcctgcaatgcatgctcatagttcctttgccctgcaaaaccaaccttctcgtcaacatatgacgacggctcattcggtacaggcgcggaggttgtcgccgctgtgtactgaggaacaatgtgtccacctccggacatatttctcgggatagcagtaagcggaacttcaataaagccattcggatcttgagatggtggtccaccattgggcacgggatccaggacatgaccctgacccccctcgccgcggtgcttatcgcggctccagaaaagcatcatggcgcgagtgataccaatcaaggcgatgaacacccagagaaggaggatgacagtggcgatgatggcttccattcgcacggcttcttcgagcttgttgatcacagcaatgacgacctccgtgattttgttggctgtttggtcgcctgcatcggcgaggaaactatcagaggggttagagctgtcgttgatgctggaggaggcgccggcggagaatgtgtcgtttggaagggtggggagcgagatatgtgcgtgctcagctacccagttcagacccttttggagtgcctccgctttaaggccgatgaggcactcgtatagttcgtagacaggctcttgcagcagagtacctttgaaggtctcgtttagtacgctggatgtgttgtagatgaagaagtttagagtcccgtttatggcttgcgtgctgctgttgacccagccgaagacattgtggtttaggtcggtgtcgagatccatgatggccttgttggcgtcggtagcccaatctgtcgaggcactctctagtgagtcaacgaccttgtctgcgaattctcccacctcggcactcaacgctgggactgtttgttttaccgagtgcaggagcaggtattggcacagacaagagaatagtgctgccagtgcaagagccagcacgaaaagagcagggatggatgttgcataggcaatggcccatcgcacgaggatctgccggcggctgttgctgaagtgacttgcggccttgatacccgcagccgcggtgtatggccgggagacaatgtacacaacatccattgggtcatgggcttccgtgcgaaccaactgggagcgctctttcattgagcgccatcggcggatctcttgccatgcgattgggatgcacaccaatatagcagccacaacgaggacagcaatgaatattttgcgtgcctttagtgctaactcggtgaccccgttgaagaaatcgttgatacctttgttgtcgttgcagaaggccaactgctttttggcagggaccgggagagcagaccgatcgaagctgtaagtgcctaaagtgctgttgactaagtccttgacttcttgaaagggtgtttggaagagggtcttggtgtaattctggatttctttgaagttgggaaggacgacgctgtccagcttttcgaccgtgcggttgaccgacgacggaagagacagattctccagtgcactgatcgagctgttgaggttgattgggctaggatcgtccgagaacacgctggccactttgttgattgtctcgaggaatgagttcagttcgtctttatattcattgaccgtactctcaatctcgccactgattgactggagggttttgttgatccactcagtagcttccttgaccagctcgatgccggcccctactgtgccgcggacggccattgtaatgagacaggcgtaggtggagtacatcatattaatgacaaaccagaggatctccccgacgcccgtgatagtcaacaacaacacggacttcagggcagaaacggcctcatcaactgaggaggccaccagctcattggtacccttggataggtagtacggcattgaagccatcgcgctgcccatggattcaaccgacgtgcatgcagagagcgcctcacgcttggcggatgccatgttggactgcaagtcgccgactgcaatcaatactcggaagagaataagcagtaaaagtattgtccaccgattgatccatacttgtgaaagtcgagctcgcagaccgagatagggagtgaggccatctggatgtagaggaattatccgccccgtgcttgaatcgtgagctccataaggcgggagaagtggaaagatggaccgcccagatcgggagaataccattgtagtgtaattttcttttcttttcgaaagatagttgccaaatgtttcagatgtgatctcgtccagcgaagaccgggaatgcttggaggcgtaattaaatcaagggaaaatatgcaaagcctgcataaaaacagagagatattagaagaggataaagagagcaaaggaaaagagccgggttagtggagggacatggtgtatataatttcttatagatgttgaatgaatggggagctcaatagatgaatagaagagaacaatagaatcaaaatgaaagggacaatgaatcttcaaatatagcagacagcaaacgtcacctgaaaactgtcagacatcctgggcggcagcagacattgcaatggcccaatgttgctcataaagaagcagttgaatggaccttggcaaccccgtatagtcgtgacagccccaatcagagcgaaccataaccatttcgaaacaaagaaagtataaaaataaagactgaagacgaggagtctgtgcaatggtttgtttcatgaagcatcagagcgtctcactggctactttgagtgtcaaaagcgccggagtggacaatcagccaaatatagccatgggcgcttagccgcccacgactgagagccaatagccggacagtaagggccagtcgatcttaatatcatgcttgtgcagatattttggtcccttgtcatgtgggtagacgatacatatgtcgtttgacatcccttggggtttactccttattctggctgttgccgcttaactcggtgatttcgtgtgaatcgattcaccgactcgctcactcgagtgcagagcagaatttctacacgcacaatttttgatgatataaggataagtaaacatgttgcaatatattctattgttattataggtcatttaacaagttcaccaagggttgaggtgtgtgaaaaaagtacttgatgcttattcgagttgtagtcgccggcgttgaaaggaacgcatcacgtgacattcaccgagtacgtcgaaaacgtgactccacgtgacaaactcgcaccctaacaactcgcaacgacatgccatgacttctacatatgtatggaattccatgctgaaggcttcttgtgctgcactaacctatgatactttacgagtatatacctgtgttactggctttttgaagtacaatttccaatctcttatgtattgcaaagaagattgatataagcaaagtgaaattgaatccctaatctgtagctaaaatacattaaagctagcgcaagaacagctctgttaacagtatcagaattatcacctctgtcatatgccctctgagcctttatgtcagttccttgacctcgtctttggttagttggtgttgcaaagacagctcaataatggggacccgtgtcttgaccagcgggccagaaagaccccccaataacgagggatgtccctcaatctggcaccgtctcttgatgagcgggccagaaagtccccccccccaataacgagggatgtccctcaagctggcaccgtgtgttgatcagcgggccagaaagaccccccaataacgagggatgtccctcaagctagcaccgtctgttgatcagcgggccagaaagaccctccaataacgagggatatccctcagaccggcaccgtctcttaatcagcgggccagaaagacccccccaataacgagggatgtccctcaagctagcaccgtctgttgatcagcgggccagaaagaccccccaataacgagggatgtccctcagaccggcaccgtctcttgatcagcgggccagaaagaccccccaataacgagggatatccctcaagctggcacccgtctttgaatatgtagctttaatggcgtggggatatgatgtaaagttcagggtattgcacaaatccgtatcgtttgttcaatacggcgacctcgtatcacgtatttcacactctggggacggaaacccacggaattgtccggtcaagacaagcctcagtatgttttcttccttgatgcatgacaccaccttgttgagaaccataaataccatcaaggctactgcatacctcgacgttcaactgatttgtctgaccagatcgaagaaaacaagcgctcggaaaatgcaaatgtatgtatctccgttcctatcacgctcgcctggtcagtcgcgacttccaattgaagactctgacagtaccacgtgcatagtgtttgtctcatccatcgtgtcgaatcttgaagcttgtctcttttgagttcttcatcttcgactcgtccgaatcattttcttccaatcctctcacacgcacaaccattgacggtttcagtgcactactcctcatccccttgatctccttgaacttcaacctcttggtcaaagagacaaaagcttgccttcgtgacgaatgacccaggatccacaagtaagttgtcacgcatactcacgcgttggttcgcgaccaacaccaatggaccttgactgattcaagtagcccacagcacgcacacccgttgaactggttcgtgcgctccttctcatccccttgatctccttgagctgaaagctattagtcaaagagacaaagtttgccttcataacggatgacccaggaattcgcaaagtaagttgtcgcgcatattcacgcgttgggttaccatcaacacccatgaacattggctgatggtgcatgattcaaatagcatccacaacacacgcacccatactcgtgacttgtgtatgtcccctttcatccctttgatctccttgagtcataaagcccttttgtcaaagagaaaaagcttgttttgcctcatggtgtatgcatgagctaggcttcgcacagcaagttgccgcacattctcacgcgctaggtcaccaccagcgcccacaaaggggcctgcatgattaagcagcatccacgatcctttttgtgagatcaagtctcagtgccttctagtgttttgaggaccaaccttggtaagtcgcttgtcgtgaagccgcacataccactcatcgtcccgtcgactgacgcatggtcaagacagtccatacagtctgttgtatgagaccaaaacaaccttggaccaaagagagccccgtgacgaccaaagactatttggtaagctcatcgcgcagctcctctatgcgcctcaactgacacatcaaaaaacccagtgaggagcaagattactgttggcttttgccgattgtcaagtgtgtcttcttgctaactgcagtattggatatccatggacctcaactaatgcagagtcagttcaattccaataccggacagaggacatcaagtaccttatccttattcccactcggtacgtcttccaatccaaagggaagcataactcgatagagagtcgctgaccgacgagatcaattccccagttcatcgtcaccatcagacgaaatgcctactgtcttcagcaagtttgccgatggcgagatatcgccccacgatctccaatctgaacctgtacagggacaggacgaaaagtcggaatcgcacacccagctgcccagctccgatgtatatcaagtgagccgagctcagttggaacagctcaaggcaattctagaggaggttgtggcagagaaacgcctcatagactccaaggtcgaagccataaagcaacattccacactcgtcgaaggccgtatgccagaactgttcaatcctcagtcaactagaaccgagatggggcttccggaggcaagcagacccccaagggcagacaccgacatgacccaggtcaagtcaaaaaattggacggataaacaggctgggctcactctggacaatgggcagcttaggctgaagattaaggactggcggagcagtagcccgatgttctgcatggagaacaacagcaagggcaacccgaagtgcgaccttgatgcagtgattgaaagccctgagctcgtgcgcgttgacttcaagatccccaccgattatccagagggcatgatggggatcatgagatcgattgaagcactctttacttctccaaagaagatcgccatgagcaacgttgagaccggttccgcaccggcttgccgagaggcaacgaaccccaagcgggacagctattacatgaaatggacagccccatgggaatcatccggctgccgagtaagctggatgaaggcgaaggaaaaatcgtcaaccctgaggttcaagtttgtgagtgtcaaggacgccaacccgggggagcagatgatggtcactgttgacgagcgtgaccatttctactggaagatctctaaaaaagaccctgtcagtataaagtcttcaccaataatcacgggatctaactaacatatcacagtacacttacggcaaatggatggcgcttccggtccggatttggctacgcattcaatgtctgctgtcagggactagcggcataggtaacgggctgtttgggaagttggttgtcgatgacgttccagcttcttcttccaaaaagaagaagaataaaggaaagaagtcatcaaagagacctgcaaagagagcccgtgaacattccacagctgaagaaggaacccatcaggacgaaaagtctaatgcgtcagttgtgccaagtccagggcagtcagtgttagtggaggaacataccatggagaaagtgggaagtcaagagttgaccaaggagttgaccgaggaagagttgccccaagacaagatgacccagcatgggttgacagagcaagaagaagagtcaaccaaagagtcaaccagggaggagtcaacgagggaagagtcgacaaagcaagagtcggcctatcagatgtcacccgagaaagagttgaccaagcgggtctctacactcacgattgatacccggaagagcaacgaaaggtttaagggcaagcgcaagggaaagcgcacacctacttcatctagctccgacacaggaaagagagacgcaaaccaagtttctattcacaccacacacaacatgacagagcagcgtgatggcctacttccggaagtgcacgacatcgctccacaggatgtcctgaccgagcagcaacttgcagcagttgctggccaacaaacagtcaatgcgtccccggtccctattacccccattgactcgactaccccatcttatccatcatttgagacagcccgaacccacctctccccccgaactcccttcccctcatcctctttgttgcctttcttcacacctacgagcgccttgccgaagatagatgaggatcccgaggaagaagtagtgcaagcggaaggaaacgagccagcaaaggtttcagatgagctgtgcttgactccgcaggggcctgaggttgagcttcggcgccctgtctcggacaacaggggcgaggtatggttttctggtaagtccttaatctttatatcattgttgatgcagctgctaactatcatttagactccgaaaaggaccctgttggccacgaggcgcaggtgccagtcttgcgtcggagacagtcttttgacgtggccaatctaggtacgcaatcacattttacatatgttttgcttcgaatacatgctaacaaaagattacagggccttccgagggccagaaaaccacatcctcgtcccaaatggccgaccctccatcgacctccgttgcctcttctgtcttgtccactgcagactccgctgggtctacgacttacgattccagttcatcttgcactgtcttggcagatgaccaaactccagcggagtctagccaacatgataagaagagagcatacaaaaagaagaagcgtcagagacggaagtgtaagaacttgatgaagcgtcaggaaacacgcgatgcggacgccgagttccccgtctctaacgcttcttcccaggaagatggagtggaaggtcgttctccgtctccacccgagtcgtctgaggatgatgaaccgactcccacagccaagcagttcggcaacatcgggcctccaccccctgaaccacagtgggacttgagcataattggcattctttgccagaaggcagactgccaagtcgcctgtggtttcgcggatgggggctccgttgtttgccctaagtgcggaccgttttccttggtccgctactgcggcaaggaccacctgtgggaggatgccaagatgcactggggagtttgcgggaagctccaagccttgcaccagaatgtggccggttcgattccgtacgacgatctcgtgggtccaccaatgcttcccagccttcaccagtgggacaaccctgagcgccatcgtcaggcgttgtggttcagttccgcccgcgaccgaggtgactacttcgtgttcgcggagtgggacgacctggtgagggctgaggacgctccagccagtcacttggcgctgcgatgttcacctcgaatcgcacacattgtgcgattcgaggacgccaaagagaaggaccggttccgccggtgccttgcaatctgtctcttcggtaagtttcatctcacttttagttcctttacactttcagctttacctcactctcagtttgcctgcgctttgatatcatacaaccctcaccattgcctactttttagatcatatgctaacccttctttcctcccagcggcggttgaacatccagactttgtggactatctttaccggcttgtccgggactggatgcgggcccacaacatgtgggccagtgacaaggacatggacggcatgctgcggtaccagatgggactcgagatgggtggcaacatccatcagagccatcttggtttgcggcatgcctgcgagacggagtgggtcggtgctgaccgacgccactgcgaggatccgacttgcgtgagcgagcgtctccccacgttgctcggtaaccaccgtatggggttgggcttccggagagtgtgcgaagccctagaatccaactattggattctgagggcgcaccgagccacccatccttcggtgagcgacgtggaggctcgcacgcgtggtgcaggattctcggaggtcctcacagtggaccggcggacattccgccgtggcgtcggttgggacggggcgggaacgggccccatggaggtggagattccgtggtcagggtagggagccgtcccctccctagccctctttgtaccggggtcctggacctggggtggctggtttggagagagatatcatcagtgttcaatcggtggatgccccccaggtccaggatgcccattttttgtattacgttttcggtggtggcggcggtttggagggggagttgatcgccccctcctttgtttataggaacaaagaccgtcgcgtggttgtgcctctgtcctactgtgcctttgtccttctgtgcctgattcattgttcctaggtgctttaagtcatgtagacgtagctgcacatgagtagatctgtacaagtaaaccatgcaagagaagattcatggggaattagtttttgtggcatatctttcatctttatatccaatttctattggcttcatatcacttctatgcatatctcgtcacttctcacatatcaaagccctgattgtctttgtttactgggcgatatacttcttcagccctctcaagcgctccttggcagtctcaagaacatcgtcattcttgcacaccgcaaagcggagataatcctcagcaatgttggcgttggcatcagtgtagaattcagtgggagggatagcagctacaccaacctcctggatgaggaaccaacagagcttgaaatcacgaggacggctagcaacatgaggcgggaatgggtagtcagccggcagctttacagaggccatgttggcaagcacgaagtatccaccctcaggatcagagtactgtagagattgttgtcagcaaagtcaatgtatggcaaagtagaattgatacttaagggttagagtaatcacataccgggataccgagctcatcaaagacctcgcagaaccgctcaattttacccttcatatctgttcggctctcgtcccagaagccttctttttctgcctgctcgaaagcaacagcagctgcttcctggagaggagacacactgctgtaacagatacgggtgtgtgcaccggcaacgtacttgatcaggtgttcagggccgatgaggtatccgacacgccaaccagtagcgtagaaggccttaccggcagagcccacggtcaaagtgcgctcgtacaactctggagacagagtagcgattctagtatagggagtatagaagaggcggtcgtaaacttcatcagacaaaatgataaggttgtacttcacgcaaagttcgccaatgcgctcgagctcctcgcgcgagaagacctttcccacggggttatgcctatgaacacacagttagttgagactttattcgcctttgtagatcaaggctgcttacggtgagttcaagacctgttacaattagcttgagtactcatgaaggtctcggtattgcatgcttacaatcatctttgtcttggggttcatggccctctcgagttcctcaaagtcaatagtccactccgacgcagatgatgtcttggtcgcaccatccttgggtgggtggaggggaacatagcggatggtaccgccgggcatctcgatgttgctaatatatctattccaagtgaattagtatgccttcaactcttctcgcaatatcggtgctccttactggtcaaagaagggctcgaagataatgacctcatcaccatcctcgatgaagcccatgaaggcactaagcatgcctattttttggtcgcttgtcagcgccaaatgtccattcataggtgaattataccaatctctcaccttcatttgcgccggtcgtgatcgagacctcggtctcggggtttagcttcttgccaaagaagggcgagtaagcatccgcaatagcctgcttaaggcgggggcggccctatattgtatgagcattcgtgcaaccttgcgcagatccgttggcgatctctaccttcgtcggagagtattggttgcattccactcggtctagcgcatctttcgcagcgtcaagagcgaatttgggagggttatagccactgcgtagaaacattgtacgtcaattcctatcctttaaagtgattgggggtcctcgaaaatgacgcgactcacaagaacccttggcccatgttcacaatcggctgaactggtgaagctgcagcggcctcgttgacgattgaccttcagttcccatttagtatttctttccaaacctgtttcttgaaactgcataccaaacatcctggcgctgtcctgctacccgcttggcggggcgaaatggatcgggtcgtgaagctgtagccgacatcgctcttgcgccgtgaccaggtcggggtaatgtcgcaggggcgaagaagaggtttctggacttgcaattctgtgattgagcaagaatatgccgataagagcgggaaatcatgagtgttgaagacaataaggagggagaggacaatatatggcgaagttgaatttccccaccattgcgtgctccgcactcggctctgacggccctcgggagttgtttctttacttctcttcgggtcattcggagattatatagtaccttgcttgtacttatcatgtacgtagtacatatgtatagattctagtagttactacctatgtacctatgtaggtagttgatcttgttgcccattttcaggcaccaaggcctgttacttactaattaacgcgttgaacgcgtcgtacccgcaggtggaggctatcatttctacgtttattcgtttacctcacctcgaagtctttgagtaacctagtgaatgaccagatcattctccggtcatcatgatttcctgcccaatatgcgagcaatctgtctcccagttaaaaatcaacgaccacatcgactcgggatgtcagagcttcatcgaagaagcttcgtcctctccaggtgaactggcatcttcccagaagggaccagtcccaagcatgtttcaacctccgtccgcgcgcaaagcttctgcccagtcgaatactcccaaagattccccgtcccgtcccacaacgaccccacgcgccctcaacagcaagcgatcatttatcgaggaagcggaatctagacgggatggggatgggccgaagcaatcaaatggtgacacgaaagagccacaagcaaagcgcccgaagatcaacgccttccacaaagcagcacctctagccgagcgcatgcggcctaaaacgctcgaagaagtttgcggccaagagcttgtcggacctaacggcatcctacgcggactcatcgaacaggacagagtaccgagtatgatattgtggggcagcgcagggacaggaaaaacaacaattgctcgagtcattgcgtcactggtgggcagcagattcgtggaaatcaacagtacgagcagcggcgtggcagagtgcaagaagatatttgccgaagctcgtagtgagctgggactcactgggagaaagacgatcatcttctgtgacgaaattcaccgattctccaagtcacaacaggatgtgttcttgggcccggtggagagcggccaggtcacgctcatcggtgccacaacggaaaatccatcgttcaaagtccaaaatgcgctgctctcacgttgtcggacattcactcttgcgaagcttaccgatgaggacatcatttcgatccttcatcgtgctcttcaggttgaaggcccgagctattcgccctccgaactggtggacgaagagctaatccagtatctcgccagattcgccgatggagatgctcgcacttcgttgaatttgttggagctagccatggatctgtcaaaaagggctggaatggacaaggaggacctgaaacgatccctgaccaagacgctcgtgtatgaccgtgctggagatcagcattatgatacgatctccgcctttcacaagtccattcgagggagcgacccagacgcggcactctactaccttgctcgcatgatccagtcgggcgaagaccccctgtatatctctcgacggctgatcgttgtggcttccgaagatattggcctggcggacaacaccatgctgtcacttgctatatccacacattcggccgtggagaagattggactcccagaagcacgaatcaatttggcgcatgctaccgtagcgatggcactatcgaaaaagagtactcgcgcgtaccgtggcttgaataacgtctttgccgccttgaacgagccagggatagcgggattgcctattcctattcatttgaggaatgccccaacgaagctcatgaaggagctgggctatggtgcggagtacaaatacaatccaaactatgtcgacggcaaggttcaacaggattacctgccagagcaactcctcggtcgtaccttcctggaggacttggaccttggcacgcggagagaccctgggttgaacagtatctcatatcaaagaaattgattgtcttcactgtttgatcatatctcccttcctatacatcaagtccaggcccattctatggggctatgacatcgcagccttcatacttccgtttttgaaccccggaaactacatacactaggtaaaccttatgcctagcgatgcgctataccggatctggactcggtctcatgggcctggtcatgcctggtcgtgcctgcttcacctcgagtgacgccgttatgtcctttgccatgatgttgaaggttcagagctaagcctcggccaaggtttggcctggttatcgatggtactagtccgtttcgagtaactttagagatgcccaggtgtatcctctagttccatctttacctcacatcactcattctctaccttcgcaaaggatcgacaacttgttcaagtacaaacgtcagtttgttattaggctctgccctgagcccggcctttcgctctcgcctttgctcgacgatctttcagagtctcgctcagtgctattcctctcgtttatcctcaaaaccatgatagctcaagccgctacacggcatcagtcatctcgattatctcctcatccgaaccgcgggcgtaaatacgcaccgtcgacaccgcatccaccggattccgtctatcctgtgagttcgatctcccatctcgccctcctatgtccctatgggttcccttcaagcctgcacatgtcgtgaattcttgatactgactacagagctttcagtctgccatgtctcaactcgcatcaaccacaccttacttttccgaccccaatatcgagcattcaatgccacagacgtggcaattgtcgtcgacgacgaccatggtatatgagatccagcccatggattcagaaatggtcaacgaacttgacaatgattcgataagcagccaatctcaggatattagcgatcaacatcaggagctgacacttcttgatgacccatttggttttgattcaataatgacacctgccacatttgaagaccaattacaaaactccgtatctcccacaagctcgaagtctcgaccctcgagattttccagccccaacgatctcggttcctgcgtgtcggctcaatatgagcgtgctcgaagtgaacacagcggcggtgaaacccaaccatttgctgcgccagtacgtccgccgtctcccgctctcgacaagatgtaccccgatggcttcgtcctatgggatccagcggaccctgggaagtcagacaacatccgcgaaaaaatcccccgtaaccaggccgaacttcagcaacagagagacgatatcgttgcactcaagaaagctggcggctcgtgtatggcgtgctaccgggctaagaagaaatgtgggacagctacaccctgtcctccgtgctcttctaagggtaaccgaatctgctttcgaagttggggagatctatgtctgcttgggccgcctacaggggactcccttacaatccttagcttcccgtcccaagaggcaaggaataatttgcaacgcatgagtgacgaggtcttcaaacttatggatgcattcaaagcggttgtcaatatccgcgaaacatatggcggagcctgcactgcatggaattggacagtaacgagggccggtatcacactatcgagtagaacagagtgccccgtcgaggatttccttgctggggttaccagtgtcctccccccggtggatttgggcaaaattggagatataaacagagagaacccgctcgtctggaacgcaatcagattggcaaatctgtttatagccattcgaggcttggcgcaagctcaaatccgtgcctcctggtatgaaattactaccgggcgactcgtttcgttttatcttttgattctctcttttcggaagctagcgcaaatgtctgaggacttttgccctggtttgtatgtggccctgtgtggaaaggacaagcagaacaacaagaaaagccggccacggaaagaaaatgagattgatcctgcttggttcgccgcagcattgtattaccgagttctatgtgccttgcaagatctcctaaacgaccacatcgttgcgagaatatttggcgcctccagctgttatctgagcggtgttcgtgaaaaactcgaagacatcctgcacaatgtatcccccgggcacggggctacgggcaaatccagatcgattcttgagggaggaatcccctacctccagccatcgccagacgtggatatggctttctggctaggagaccccgaggaaatgtcgtctgttctgaggcagcatgacaatcccttttcgacaccaccctacgaaatgcaatcgttcttggctgatcatttccctcggccttgcgatttggcgaatcctgttgagcaggccgatgggctcttgcaaccatcagcggcttctcacaatacggtaattgcccaagcacagaatggcttggatcacatggcctataccgaccagattgaaagattcgactcgaggactctgtttgacttccctagtgatgagtgtggcaatgcattcgatccaatgactgcaaactttgtcgatacaatgccacccgatacaatgccagtctatggcttccagcaatctctgtacaattgttgaagctgtctgcaacaccaatattcgctcaccactattgttttgtatgtttatttcacaagttattcatgggaggaacatacgacactcttttcaaggacaaagttgctagataggaaatgaggtttttcatggcttgggagatctgtccaattgtttgtgattagcaccagttgtgctgtgtctagaagttcgctcactcgctcatccttctagaagaaataaattggaatcctaaattgtccctaaagtaataattatttttcgttgatcgctatatctgtaacgaaagcaaaacagcgagcagcgagtcattccgcccgcgtctggcgcgtctccagaatcctcccaccgccaaacaccccgtgggacctcatctaaccacgcattctcatgggctacgagcccctccacttgaattaatgctgaagaactcttgatccagccatctaattaaacctgaacacgccattcatcatggcctctggccaacccttcgcgtcgcgctcctacgccggcacgaaactcccagaccgctccgtcaacacgaacgcgatgcccttcagcgcctcatcattctcacggcatcgcggtctgggaaatgccaaccaaggcgatttcaacggccccgaaggccaaaagcaaatgcaacagtccgcgcccgcgcccgcaacaaacgcacagtcccatggcccagcgcaggacgcgaatccgctaagcagactcaccgaagagcagagggaagagatcaacgaagctgtaagggataccctgatccatctagacaccactattccccaaatactgtactctcccgcaaccccgcttctctatctccctccaaggacgcagaaaacagagaaagaaaccgcaccacaaaagccacttccaaacccaccagctaaccaacttctccaaagttcaccctcttcgacctagaccgcgaccgccacctggactaccacgaactccgcgtcgccttccgcgctctaggcttcacactcggcaaacaagagctaatctccctcctaacaacctacggcgtaccccgaccacaagtccagcaacaacaagccgcggcaggcaaccaacacggccaagcgcaagcgctatcaaacaaaggcccggtgtcgaacccccaacacccatctaacctgctcatgccgctctcgtcgttccaggccgttacggcgctgaagatcctcgagcgggacccgcgggacgagatcctgcgcgcgttcgagctgttcgacgagggtgctaaggggtttattgaccttgaggacttgagacgtgtagcgagggagttgggcgagacggggcttgaggaggaggagcttagggctatgattgaggagtttgatctggagggtgtgggtggtgttactcgggaggcttttgttgggatttgttggcaatgagttggatgagggggattcttgttcaccttggtaaggcctggatacggttggatgggctcgttctctgagaccgcgacttgactgagagttgattgtttgtgcatggggtttttccttggtgttgggttctgagtatgttacttgttctcttgtcgttttactcatgtgcttgtttgggagtaagtgcctgcgttctattttgggttaaatcgaacttcgaatggatattcattcctctatacgatgtctacatctactctcgacagttactatgcttgctaggtgagagaatgcggtgtgattcatagcccaaaggagcttcaacgtaatctactcaaggaaaatgcataaaaatttcaggaaggcaagtagccacaagaaaggaaagcccaaaaacaccagatcgcggatgttagcatactatacggaaagataataaccaaacatcgcgcgatgacgccgatacccaaatcccccagaccgcgaaacctagaggcttgaatgcaaagaaaaggttcagtagaacccataaactagaataaaacaagaagcagaggggtgatcatgagtatcgtggcggggggccaggagggggaggcacattcgtatatccgccattccagtatccatgccactgctccataggctggcgagcagtaggctggggtccattatagcgacgatatgtaccaggggggatagccttgcgggccttacgcagctgtgcattgcgcttgcagcgactatagatacagaagaaaatggcgagcaggatgaacgagccaacaccgacacagatgccgataaccagcttctcgtgctggtggatccagcccagggccgaggagcccttgcactggcctgcgctgcagcggccaccagcgtcgcagggtgtaccgtcgaggtagttctggttcatccagatgcactctctaacacccatcgactgctggagtgagggagcgccgcacacgagactgcaagatggcttatcggtgttatcgcaggcccaggtgtcgttggtgtttaacatcgagcctatcaccgtgcggcactggtagtcgcggctggtgcattggccgctggcacagctgagatcttggcccttggcgccgcagctggaaccatcgtctttgtatttgttgtcgggacaggagctcgaggtgccgctgcaggtctcggcgatgtcgcattctccggtgctggcgcggcagacggtgtcggcagcggcgaactgacatttgtcacagcagctgtcattggcgtcgtcacagacggcaccgcctttgaatttgcaggtcttcgcgtcacagcaggcattgtcgctgcagcttttttcgtcgccgcagtcacactcctcgtcgccttcaacgatgccgttgccgcactggctgccgctgatggtgacgacaccgcggttgtcagacagacaagtggacttgatgctgttcttgccaatggcagagcagatgttaccgattgtacactccgaaaactcggtcatggtgttcttagcataggggttcatgatgtatttcgcaccggcattgcaggtcgacgaactcagcgggcagcattgggacgaggcatctaattgctgtgcgcaggcctgatcctcgcaatcgtgcactgcaccaaaggtgtgaccagtctcgtgggcaaacacctgccaggaagaaccggcattgcgcactacgacgttggcaccggtcacagagttatctccagaggtaaccaggtcggacgagcatagacgacccatccatgaaactcccacctcgctccctgttgggcagtttgtcatcagagtccagtaggcattgtcatccgaatgagatgcgcgccacttggagaattcattcaggcgccaggtgacatttccaccgttgcaatccacgttccatggtgtagcggaggagcccgtgctagagcagcctgtcgcggagactgtaagattgcgcaaaccaatggaaatattgaaagattcctcatagagacttgaagccgtgttgaccatgttgatgagccagtccttggccgctttttcgggggtggagtttgtagccatgaatgattcggtgaattcacaatccgttgcaattccgatcaaggcgaccttcttcgttttaggacatccactgtcatcaccaatggtcgttctcagattcacaccgccagtgttgcccgagacgccgccaacatctgacgttgactgtcgcttacccaatccaaacatcgagttcaacgaggcaaccccccactgaccatctgtttcgtccatgtcatacccgaaaatcgagttagacagatcagcgttgtacccgagttgatctgccccgcagccctcagatacgggaagcgatcgcttgagctcagagtgcgtatagccaaacatgtcggagtcacggtagacgaccatagattccccatctctgggttccacatgggcatcgatcgggcgctttttgtcgaggtaggtggactgcaactcaatgtggtgcttgttattgtcaacactgaaagcaccttcaaagagaggctccaggccatcccttttgacggtgattcttgcccagcccacgggcgtccatctccccgttccggatcctaccaaggcacggccttggaacactttgtgctcgtctcgcttgatcggttccgcctgttttattgtgccgtccacgcccacatattgcacgtacgcgtcgtcggctaagatatcatggttgggcttgagttctagctttatgcgcttgccgtcttggtgtaaggagaaggtgatatcaaattcggacaggtggtctatctgatgtgaaggagtacggatgatggcattatcgacgggcgtcacccgtcgaatggcctctgaggcctgtgatcgtgctggatattgtcagcggctaggcaacttaggcaacggggggtgctcaacgggctcaacaggctcaacgggcagcaagtgggtatttaccttgtgtttgttgaaagagcgatgaaaatgcaccgattaagggcaagatagtagaaaacctcatcgcaaaatatccgaatctcagggtccttccccggtctttcggggggaatagagtttccacctgagaggggggaaattcaacgggtccaccaggggtttaaaggggtccaaggagaaaaggatattaaaagagagaaatcaacgagagactaagaaaatagaatcagaaaactcaagaagaccaaagagtgaagagaggaaagtgagagacatcagataatccccggggccttacggctacagggctatgcgccaagggcttaggaatccaaacttggcaaaagtggattgaaacattactattttgggtaattttcaatctcaatattggtattttaatattaataataaatatttaatatacatacctacctaggtaggtatctaatataaaggattggtggagagatccctaggcagttaaactatttttatccaattctgttgcctattacatggtataatataaggggataacctgttggctatataactactccgtatcaacatataaacttgcctcttaagatcgaaagttaatagttaaccaattcctcgtagatacagggtctttatcttttcttttcttcatactatatttgtccatcggacgcgtaagtggctcatcgccaaggcgcctcgaacctatcaaagggccttctgacggcttggcatttaaggctgccgaataatggttgtcttattgttcggaatgatatatctgatgtgccaactgcgcaaaataggggattgacaccccacatatagggcagtccacattccccaagggttcatcatcgtcccagccatcgtccgattgtgactgtatctcaggggaaccgggcaacggcatatcggaggactcgggttcccgcacactccaatccttaagtactgtctcctgttggcgaaacatcttcccaatatcacgtccgctattctgcttctgatcccctgcgctctccaccatattggtaaccgcaacgttcaacaaactgaggttccaccccgtcttttcgggatgtagtttgcgaaacatagaaaaaagactttcccggaccagccgctcggccaatgcgtcgatattctcatccaagttgaaaacaaagggtggtagaggtgccgagcgagagatgcgattggaattgtatgaacgcccacccggatctggcggaggccttggtcgggtcgataatcgcactgtgcgaggatgagcacgccatctcccccggggcgcactttcatcactcatatcaagcagatcggttcttacgcggcggatgaggcttcgcgacaacactacgagctctcgccgtacaccctcgagggtatctaaccggccataagaatcctcgatgctgatctgggtgggcacatcgcgaccctcgagcacctcggaattatctactccatggagaatgctccagatgcgcatgccgattcctttcactgagcctggcccgccaaggattctgtccagtaaaggtggacccatgccagggaactgtcggacatccttgactgtgatcttctcgtcgacgttctcttgccctgtgatatgggatttcagtttctgggcaatccgagaaccaatcccaggaatcttccggatctcatgatcatccaggaactggaacacgttgctagtattattttccgtcgccgtatatggcggcagaagagtcgtttggccgttgggcttgtgaacattaccgaccaactttgccagcagtttggaggttgagatcccgcctgtagccgtaaagcctatttcatgttccagtttactccgtatatgaccctgtaaatgagaggcgacgagcaacctcatttccgacgaagacgaatttttccgagcgatgcaggctgcctccattgcgggaaaggtcgatccctggaagcgagtggcatcgtaggaaaagcccacggtcggatcattcctatcaagatggaaatacgaattctcgaggtcattttgattttgcacaccagtgttgtagtcaatcatctccgtgacatcgagaaagagctcgtcaaagcctagcttttcaacacggccgccccagacaaaggaacgaaccagctgataaagctccctggaggcatttcggaacttggtcaagtcttcacccagaactattaccacatcgggacagatgcgcttggcatctttgatgagctgcaacttatgcagacctcgccgtcgggcttcgtagttgcaggttaccacgatttgcttttgttgaactgccaaagggagcgacctcaattcaggttgctcaacctcgaagacagaggcatagaaacagtcataatcctggatatggttagtcacgaggtaggtagtaaccttggaagagtgggggggagttaccaagtggaggatgatgcgactgtcgttccgcactagtgcagccatgaaccctgagctgacgcagacgtgtccatggggacttgattttcgacttgattttcgggtgcctggcagagatccaaagctgaaaacaggaaccgaaggcaactttcaatgggaaccccgtatctgtggctagtgtgtgtgtggcgtcagtggcttagcattattagccttgttgcctaggagttgcatacaacataactacatggtgacaactctgtagttaattatattatattgtatcggttccaggaaattgttttcaatataagtcagtatatatctctctcttttaagaccataagcccaaagtgagcccgtgcagcctcatggtcgatcaatcctttaacgtcctccaccatcaccgtcacgaaagtggaaatgttaggtcgcaagttcaccaacgccattgggtggaggcgatgtcacactgccactcccaacaataagatctaactagtcgatatggtacagtctgatcgtatttcctaccaatcatagcctggaagacaccctctttgatgcttgcggccgtcacgtgtgatatactagagtgacacggttttatctcagggctttcatattaagtactacatgtgtacggagtataggcaaagccgacatgagacaaggaatgttaagacatatttcagcatgcagtctcatagatttctccgtatccaccattcttaggtctttgccaccaaagtacgtacccgtatagatgtagatcggagacccacgggccctgttctttttatagatgagtgcttttgctctcttctaatacgaatattgacactgatagactatttaacaatatatttatattaaaatactctaccaagtaatgcgtacgttatacaactaaaatagaaaaaggagcaaaggtggtggcgtcgatgcgcatctccacaatgtgtggaaatctctgctctactctaagtatgtacttcgtatatatggggtatatggacatgtgttaaatactctaaacacatatgtatgttgtactcccttaatcttaaatctttcttaatcttcttaatcttcttagtttgtgacatgcatctttcatcacatccaagcgccaacctcctctattcttagttcaaccccgctatcctctttttttttctcccttcgatcttccatgatacgcgcttgattctttttatccttgttattgttatcctccttcttctgcttcttctctacttttcatcatgtcgtgtctgtcgccagatgccacaaccacaataacctcccgaccaaaactcacccttcaaaccacctccctccctcgcacattcggcacttcaaccaccggcctatccttctccttcgcagccgtgccagcttcatcccccaccgttcgaaacactttcaagaatgcctatgaagtcgcatccccatcttcagcgacctccccttccaaatctacccgctacaacaaaccgacctccccctacatcctccacccgaacaataatatcttcaaccaccgcagcccctaccaactccccatcggagtgcgcagcattttgcgcaactccccactagaaccctcaacccgccgacgatcaggctccatatcagcgggcggcaacggacccaacggcgcgagctcacgtcgcgtcttcttcccagcaaagaaacaagtcagctaccggtacccactggaggaagagatccgaacagaacgctacaccgcgcaacacctcgatctcgtaacggaggaggcagtgcaaatcgaggcagacaccaaaaccccacctgagacacgccccgcccccttctcggacctcgaaggcgaaaaagaggactcagataacagcccgtccttatcatcagagacaagtggctcgggcgatgatagtgctgatgaaggcgtgcgtgggtcgctctccaagaccgaacgcaaaaagcgccgcaccatgcgcatagagcgtcaggttcgggcggtggctctgctagatggcttcgaggctgatggctcgtctacaccgcaaactccacggcagggtcgggcgaagcggcggagggaatggaaatggactctcgggcccgtcgatacggcctcgaacaatggccccgagaatgtctcattattgcacgcggcacagggcacctctggatctgagtctctccgagtatccaccgaatttgcacctggtgatgaatagtgctatgttattcatggttttatgtttgatgtcttttttcttttctttcataatcttttttcacgccgtttctttttcctttgcataacaatggcgatgcatatatccacgaatcatgttgtatagaggcgctgtttggggttatcgggtggctttgagctctttctttctttctttctccttttctttctttttcttgcattggctgagtttcagtatcttattttctatgcattaagcatcatatccttccgatgtatacttatatgtatccacgtcttccaatctggtaaggcaccgcaaaacaaatagcgagtgactggcaagaaagtttatgcatccaattcataactgtataatggccttggaagccctggaggttcctcgtgtttacaatacaagatttcgctgcatgattccaggtcataatacatactatagcctgctttttggctgacgacgaaacatatatcctgcgataaggaatcttgtcctgcacgattgaatgggcgatatctgtaacgctagcccttaatgtgtttcgggcacgctggcatgtggtacatcttcttaatggctatagtataggccccgaggacactgcagtcactgcccaggtgaccatctagactttagcgctgccttataggaatccactgctcctctcgtatacatatcaatccatatgacccccatggacggatatgtcatttgtatactcgactccatttctcctataccctctctcactctatggggcgtgatatcgagtcttttaaatatgtttcatccaatattagctagagactgaactctgacgaccttccatatgagcactgtatacgggacctgagggcgaccaggacaaaggtagtagatgtacatttcagaagcatctcgtacgcaaggtacatgatggtagtgaatggtagtcatgagcgttcaataactcgtggttaaacagtaaataatggatattcacattttatatacccaattcatgccaatgcaaataacatacaaagcgccgaaaacaaatacaaaacattcatacatcgtcaagtctccgtctcaacatctggctcgcgaccagtcaggccacccgctccgatcttcttcttcatcttacggagcgcatacttagcctcatctttggcaaaagcagcattccgcgcaggccgccactgcatgagaccgcgctgctgccgctgctcactgtgtttgttcgccctgtttatctggctggtactcatattgctttgagacaaagacgacgaagctccagcactgccactgattgtcgacggccccttcgacaagggctcgagctcttcatctgattccgaggtgtcctcgtcgtggtgctctccactctggaaactgtctcgctgagaaggttggtccttgagtggaggaggggtgtacgggtcatggcgagggaggtcgcggccaggctcagcgaccttgcgtccgatggaatcggtataggcacgcgggtcttgaccaaacgcaccactccagtctcgaccatcgtggtcaatccaccgctgacgctcagcaggcgaagcttgctttaagatatcccgtccgtcgatcaaagactgctcgtgcttttcctgcacttctgtaggaacttcgatgttcacggtgcgggaacggacaccctgtgataaacacgcttcccatgtctcgaacgtctcacgggagtcgttgtcgaccacgaagcgctcgtgcgactcgtcaatacccggcgagaacttgcatcggaattgcagacgtcccacctctgttaagtcttcgagtccaggtacttgcttggctttccagttttcctccgtgacgtaattttgcgtcaagcgagcacccatttttgtcgtccagatgggaaggtcgatgtttgtttcctcgttgtcgacaagatgctgcagccacaaaacagagtatgctgccggacctcgcttgccctggttatggagctcgaacaccactggggagcggtatcggtgcttcacgggcatgcgtagcgagtcgcggaatgtctggtctgaggtatcgaatgtcgcatcgctgccttgcatgtggcatttgtgccgggtgaccttgccaacgctgccaccggtgcgcatcttgatcttaatgtgtcgaccaaagcccttcgcgatgatgctttgtccagcaaattcaaaggtgccaacatcccagccaagcatcggaggtggcaacttggtctccacgtgacggaacaaaagagagatacggatgcgtccaaacccgataccaccatcgaggggataccagcgggtcacctgtgaactggtttgaagaatatcggacagtttgaggggaaccacgccaaggatgggatcgtgctcgcgatagcgttggtctcggacggtgatggtcacgacggctgagcgccagtcgcggacaaatcgttcagttcctgcgttgaagataggcttggagctcacggcctttgcacgggtgcgatatatctgaaacatgctgttagtatgggaaattggtatgtatctacaggtacataccagttgatcgttcaacataaccttgcagtaacttgttgggagatcttcaccctcttcctctgtgttctcgccatatggcttagctggctcatactcctttcccttgcggttgccatcgctgcccttgatattggcaagctgaaggttgacgatctggtgcacaacaatgtgcacaatgccgctgggccagattggatcaggtggtgtatgcataacggcatcctcttcgtcgttgttgatggctcccttttcatcttcgaaagtcggattgcctcttaggttctcaggaaggtctttcttcatgccatcagtacgcagctcagggcggagttttggcttcccgaagtatccaacttcccaatgcaactgaccgggcatttcactgccctcatccataccctgaagcttcgatatctgagggtacatctgactgggatgctgaagcatctcacggataggtaactcaaccttgccgacaatatcatccgcggtgttacggtcagagtcccagagctcgatgctcaggttttcatctgccttgatcaattccggtgtcacaagaagggcagcagtctcttcccagattgggttaaggtcatccgtaatcacacgtgtacaatacatcggcttgccatacttggagaaggacagatttatgtatggatcactgccgccaccctcactcccgcgagtatcctgtttactcaagccgacagcgcggtgaatgcgaatccacatgacacccagagccaaagtatctttgtggatatcgtctcctgtcaacatcatgccaaggtccatggtcattgacttgggagctgcaagcatgccacatgcggtactaatggccgagttgacaaaattggagatcaagggtaagttcaggacattcactcccgttcggaacattggcatgcagcctgccctgacgtggggaatcccaactaaagtgaaagtcacatccttcatgaacggtgcttcgggcatcatttggaagcgcaagcggacagtcccgacaagttcgatcagctccacgaacacgggaaatggcacaccaaacaagcctcgaataccaagatagaagaccagttgcatatgcatattgcgtgcctttgacgaggcactctggccagttgggcttgcgtgataagcaaaggaggcttccaagttgtaataactccctccttcttcggcagcagcagcttcctgtgggtctttgttcttcttgttttcctcatggatgttgtccttcaggccctgcacatggtcgtcgggcagagagcgcatgctcagaattcggagtgggttgctaccctggtcgatttctgcgatgcgaacattctctacaaccttgggtgcagagacctgcatgatatcttcgattgtgtcggccacaggtgtcagcatctcagggttaacgagtccccacacaacgctgaggaaagtgttcatccactcgacagattcaggaagaaggttggcagttgccttttgaacaaaattagtacttatatccgttaacaaggtgatacactagaaaacttaccatctggccgcgaagttgctcactgctccactccattgctcgaccactgcgaatgacttcctgcatccacagccatactccactagtgatgcaggcggctaagggaatgaggccccaaagagatcctccgcacatccggcccaatataatgatggcaataggtatgccaatgcataaggccgtcgcgcgcttttgcaatggatcaaacatgggttggtatgacacagttggcgttgggtggaacagaacattcgtcttttctcctcggatgggaacatcggatgtcgtgccttcggcgatgggatcggggggcgcggtgatatcttgtttttctttatactctgcaaggtcttggtcggcgcttgtttggatatcctgagatacgtgttagtcgtctgcccggtgagaggcactctgtagataactcaccgtgggtttcccaatatttgcattcggaaccgtcaactgcgaatgaattagattccattcatgatttattcgagataatcccacataccatcggattagttacaggttccatagacgtctcgtctaagtcttcgacaccgatgtccttgcccgttgtcggatctgtcacggtacgcatcttcgcctgagacacttcgcgtggcttatgagcgacagcatctccctctttttgatccctttgcccggcttgctctggttgctctttagaggtcgcttgcgccttttcacgtgtaaccctttctttcttggctctgttttcttcgtctatcctgcgatctcgttccttcttctcggcatcgatatgttccataaagtgactaatggttggaatgggattggcaccactccaatgctccccaacccgatggctctgcggagccttggattgctgatttgtagccatctcggctggtggaaggaaaggaaatgaatcgttgttagctatagggatgatctcctttgactgtacgatgttgtagaagatgagtgcgccttcaccgagaatagaggaatgaccaaagagaatttaagaattgcagagaaacacaggaaagttcaagatcgacggatgatggaagctttccccagagctacgtcatcgatagagaaatgggacaacctaatgacgacgctacaagaattcgacctatcatctatctcgtacaaacaaaactgcccactgccatcatttccccacatcctatgccaatctcacaatgggcctggccaggggttgcctgtttattccagcagaatcccagtcttggcacacagctcccacttttccaagtgggttggcacaccagctgtgccttgacaatacaaagtggatgcactgagtctggaaatttgagactgaatatgttgtacattgtttctgtccgcacttgccattactacagggatgaattttagctgaatttgtgtaatgtatagcatatgatgtcatcgatcatgaatacctagttatgtaaccaattgagtgcgatatagacatctcaggcaatatatctttgtcatttttcttaccgacataaagcgcacatcacaatcagttatattgactatacctgtatatcggattagataggaattaggctagagaatgaggtacgcgaacacatggagaggcccttggtagaacatcgagaaaaatgcggggtatatgcgatgaggtgggtagaggagtggccttgaaaaaaagcgcgacatggcaacaagctatattctaggcaaagattcgtagatcgtagtaatgatgagcacaggggtggcctgttagagcgaattataaggctgatggcggtttcgatctcttaggtcacctgatcctcttagtaatgctaaaagccggggctgcccacctgggcaggtgccatccatggctctgggacctcgggaagaagctaagaaccgaaatgccgggattttgacagttgtaatcagtattccttcgatatatattatacagaataagttttgtacactagaaatacggtatcttttggaactgactttcagaaatttcatatgtatcccaacattatttcatctctacatgtagatattttaatctacatgttcttacgtatactctacatatgtatgttaattataggatcccaggtgatcccagcacccctgcatgatctctgatctcgtctaccagtagtatcttcaacaatagccatgaaagcatcccgtcaaatatgtatacccaccttaaactatgtatttacaccgccacatacgtttaaaaagatatacataattactatcaatgggcagataattgactaattagtatttatcattaagtcgtaactaactaacgcatatatgcaaggacttgactcaaatgcaggttgtcacgtggtcatgtcaatcggaccaaaaatgcgcctgatactatgttcatgacgttattttttattttctatccaaaggggacgcacctagaacgaggaacaattgactatcacggtaacatggatacgatgttcactctggtcaacagaaggggaggttaaccatactatctctacattgggtggacccgctaaaaaatgtgaaaaaaggggcatgccggatgtccctgagtacggacttgtattatacggtgtccacgtgaatgatgcttatttccagggcgtgaagcaatccatgggtgcaatgatataaaactgacaatgtagaatcgtctgtttctattggacggctcctgaaaaactggaccacacacttctctctgattggctggaaattttagcaaccattcagcgtgaagcatacatcatatggggctcgaccttgggaggttacaatattaccgactaagatttggtgttggagatgcttgaactcatggaattcattctattcgttttgttttaatcaatactttatatttcatagccttgaaatatagccaacacatgaaaatatgtgagcgtcaaataatcccagcaactttgacacataccatggctttactaaatgagccaaacagtgggccgttaggctctcggtaaactacaggtaccaatcgtaccaaacaatgttcaaccgggagagtgagcccgccaatcacaggtgccatatctcctgtgaaaacagacttgttacaagctatacagtgacggtgcataagtatggacaccctgaattctgccggccagacatccaccaataacagacccagaataccggccggtgtaattattcgggaaggcggtagcaaggggggtgtccaaacttatgcaccgtcactgtactccggccatcaatactcccaccattggcagggatatttcactgctgaagggggcttttcttcccgcttcatcacaagcgcgttggtttgtgcgtctcacttttcctattattgttcgcttaggactcagtactgacgatgaatagccggccaagtcgtaatgagcggaaggccatctcttcgtcactcttcgcggtctgatccccttccatctgcccctcacaatgataatgatcatctcatctacgacacagctgagttcgagagcagcgaagcctccgctttgaccccacgcgagtcgacagtcttcggtgcgtaccctccctggagcacagctggaatcaccggggaacagccaatgaacgcgaaagtggccattccccgactcgagcccccacttgcaaacagtaatggtcgagtcagtcgagcatgccacaactgtcgcaagcagaagaacaagtgttctggtcatcggccctcttgcatccggtgtcaggaggccaacgtgctttgcgtctacgtcgatgggaaacgagagaggaatgctaggtctgtgacttccctggatatggtggcccaaaatatttacccaagcacttagacaactcacagtcataacgagccaactccaacactacgaatctctcgtgcgcgatatttatccgaagttcgacaccgagctggccaaagtggttgaccaagctctcggaaaagtgagcgaagaccccatgatccgaaccaagatcagatctctaatcaatctaacaacccatagatatctagtctctccctgtcgtcgccgaccgccgccaggttacccgatgaggcagaatcgtcaagccgaacactttcctacgttgatcacaccctggagaactttaatggagacatctcactacaagcgattggctttgtaggagaacattcagcaacggcatggttatacaggcttaagtgtttgctcggtcagagaagttccagaccgcacggccaactggaggaaccaacccgtccgtcgatttcatcctgtgcattatttatggatgatgccggaatccagccgatgaacgacctagatgtcttcgcatatcccccacaagcggtcgccgatgaactcgtggacagatacttccaggttgcgcacgcctccttccccgtcgttggaaaagcaatttttctaagccagtgtcgatcattctattcacaatcaacaacccaccctggaaacaagtggatggcgctattgaacatggtgtttgcgatcgctgcaagacatttcgagctttccggagaccaacctcagctcgatcacaatatccacgcggtgtacttttcccgtgcctggctattacacactagcgagagtgtgctattggagggtcccaacctgcagcagacacaggtagaggggctaatatccctttacctgctttccgtcggacaggccaataggtaggttgaataccgcaagcctttacttagccactgatttggtttagggcatggagaaaatgtggcattgcaatacagtcggcagtcgcgatgggaatccatcttcgtagcgaatgccccagcatcacgcatgtgtccaaagaaaccagataccggctatggtgggcgctgtacctgttggacatcctactctgcgtcatgactggacgcatgcccagaatgcagcaggaacactgcacgacccctttgccagtgccttacaaggaagaagacttccgagatgaacatgtaatgaggcttatcatggacatcggatccagagatcgtcttatgacttctttactctcgttcgatccctccactgaaccgaacgatcgtctatcccactcgccttccccatccatgtcccagcaggcatcaaccagcccgcatctccaggctaacgtctcattgtacttactttactccattgacttggcagctgtgatgagagaagcaatcgagattttgtattctcccgaagcgggacgaaaatcacgaaacgacaccgaactggccatgacatcgctcaacagcgccgccgacaactggttttctcggctccctgcgatgtatcgtttcatggaaaccagagatgaccgagcctttgtccgtcaacgcacgagtttggctttccaatattattcaaccaaactcgtcatttcgcatcctgccctccattctcagatgtgcggtgaagcctatcccactggtcttgacaccccaatggcgacgatctgcctcaatgtagcgagccaaatgcttgatctcttacccaatgaaccaaacatcgcctggctcttgggttgctcaccttggtggtgtactctccactatctcacgcagagcaccgtcgtgctcataacacatttgctcacccagtctcaaatgagagcgggtgaaagagaagagtcattgcaaagagtccaaaaggctctgcgatggttgagtgggtgttccgccaaggatccctcttgtaagcgggcttgggttaacttcacggagctcttgtcatcccaaggattgaatattctacaataacatatcttggtcacctgatacaccctagatctccttgggtcctttttcctttgtttacctcacgtatacaagtattactgatttccttcacgatcagcgactcatgcctctatttcagatatattcatatatgtgagttcaaaccaaggtagagcgcgatgtcttatttgttggacatctggcgcagtacgataccctaaaactggatataaatgagccattttgggaaagggacgtccgtctgatgtattcgagggtacgcgtcacgggcagtgatcctggggattcaacagaacaacgaaccaggcaatatccaaatatcgaccacttagatttcttggatatcgactcggtggggtatacatagcctcacaaatagatccagttcaagaatatagatgtaatagttgccacttggttgtttggtgtgtggaggtcccccatacatgacgtcagcattcttggcccaaacaggcatatatagtcaaaaggtcatagacaggatatgagaattgactatttctctctttccattccctctatcaaaaatcccatgcacattgtacataccgaataatggccccgagatatattgtaaatccttttctccttttgtaacatggaccctactaactaacaaggtaaccttccaagactcagccgcgactgaggagatcaatgcctacatacaccaaatccacaaagatggaggcttcgttataaacagattcccggacatgatcgccaggggctttcagtacgtgtgcctttccacagagattcaacgggatatcgtactgatttatgtccaagagcacatataacggactcagtccttcataggctcgagtcggactctattatcgagaatataacgcccgatgcttgttagctggtgctcgatcatctcatctgtcatacctgtacaacttagcattctttcaatattcccttcctcattcgtgtatcttacgcatctaatgacataacatttatcttccaatttgttagtcttggccaagaatcgtctacataagaggaagtaagcgagcaagaaaaggaacggcattgacaggagacggatcaaggccctattgctgggaggccaagatatctaccaaggacaggaccgtcttaaatacacgtcgaatgaccccaagaatactttcgtatagcgaccacacaaatagtgacataccaaaataccaaaaccaagagaaaaagaaaacaagacatgcattcggtaggaacccgtcccaactgtacacgtctatcacagccccatatcccaataatcccaattaacatcataatcagccaaaaaatggagtctgaaacgtgaactgagagttgagagcccaaaactcagcaggcgggtcaaagcccaaactgttatccgccaattgggcggtttccggaacctgaccatttacatgattgatccggctatccgagcaagggggttcagaacctacgcattgtgaacaggcaaatcttgagggtcacttgcgttggactgatacagatctattgccgtattggatatagctccatgtactccaaggatcagagaaagatgcctgtctgtcatgaggatgtgtctccagatgaacgtagcgcgatgttgaaactcggcgcttttactgggagctggttcaacacggtgaaacccgattggctgagcgatgttcgcagcccgacggttggaaagccatgcacttcatatcttcccgtcattgctaaagagcaacccttgcagaaccaagcactcgagcccgtcgatacaactgacaatagagtcatcagagcagacgagcgtggaaaactaagacccatgggagacagggaagatcgagagaggacaaatcaaactccgaaagcagttgttggagacacaatgcaatccacaagatggccttaccaaccacagttggatgactagtcgagagctctccctctgaggacgaaagcaatgatttatcgtagtcttcgaataactgcacgcacataagccaccagctactgctagcctccgatataactttcaatgtcttctgggtggggatcagggctattagatcgcggcgcagttcgccccagtcccggttgatcgtgccatgtggtgtaaaatcgggctcaacggtctctgaggactgaaacctagctatcaaccagtaagcgcgagctaggggaaattgcagatccctaatacgagctgtggcacgaaccggtccgttgtcaaaaagagacaaaactggagcattgtccgaagctggtgtcacggtcgggggattcgattcgggactggtttccgccgtatccatgggcgatttcaagccatgccattgatggttcccgctgtcaacacgtatcaggagtttctccaacaggttctctgtccgagccatccgctcgttcacgtatgcgcggtccgactcgcgggggttctcaggctctggcaattcttggctccgacatggaattccccgggcgagacattctttgcagttctggtcgctatcagacgtaaaaatgcagcggactttccggtgtttgcctgtgagcgcagaaacattagggataaatcacgaattcgcttatatcaagggggtcttgtacattgccagcaactgcgggtcccctttcggatcttcttccgaggcagatccccgggccgcgcctgtggatcgtggttcgagtgcatcatcttgtaggagagaaagtctcactattcacccaaaacacaggtggtaagaattctagagaattcgaactatccaacataggttgtgcagtcaaggtcagggagaaccgagcggcaacccgtcaaagaaagctccccaaacctgatcgagttggtaccgtctgaccgccacctcgcctacaattgtgaggtggaatacagcaatgcggcttactgtcttcatcttcatctcctttcggagtaaaatgcgaaaaaggtctggttcagccatgacgccatcaccttgaactgccacccagggggtaccttcaaagcaaagtccgtgattggctcgacatggaatcctcgaggcacaatactaatgctgatgccggggagttcagcctggaaatggcaactttttagagaagacacgaagcttgtggaaatcgcctcagctccatcttctcggccgtctgcctaaccggatcgaataggacttcgtctccacgcgcgctaatgaagatttttgaaacaggaaggtctctccactagcccgctggtgcgttggcggggtagttgtacttatcttccacggcctgacctagaagtatctgtgcctagctattcgaaccctgagccgagataatatctctattcgcgtttctattggagctcgggtgatcagttctgaaatcaactcaaggggacaacagcatcgttcctctgaggggcctatcaaccgaagatctcggcacgatacctcgaggatatgggtaagtaagatgtgatagtagcgcaagtgtaagatgagcgcccgccgagtcaccctgaagaataatgtctgatggtcgttttcctagtctctggatggcgtactataggactataacgacctgttgcaactgaagagctgtcgagctttggggggcaaggctataggcaaggaatagcacaccgacgcttttgccatcttgttttatgtctgtggagagagcttcgagatagctgaagtggcccggtagcgcagggagacagtagccgccaccgggaaagtatattatcaactttcgcaagcaggatcgccaagcaagaatgccgttgtaccttcaggaagaatgaatatgtagggtgaggcttttcatagtttcatatgggcttcgtaacttttctgagcggaagcggggggagaacaagtctgcgagatgttgttagaattgcttctttgtcagaccagggaatctagatctgagtattctcctgggcttttctatcccggggcaacatttcaactcactgaagctgctccatggagggatttcgaacgaggatgcgcgtaaaagtcagtgcaatatgcttgtagaacgtggcgcccccattttaaccacggaatggagcaatgatggcagtcaatataacaataagaactaaatgtaagctgcatcagatgtcatgtttgggaaatgcaggggtctctcattggctactgacgggatttggccactgcaatccctaagcccaatgacaagggaaccatggggtgggaagatgtcaagattgttccaacctggtcggaaaatatccgactcataagacactgtgatctaagagcccagttcaagaagaaaagagatttcatggggtcttggtgcagggagctttgagtatagtgtagcagatccgccggctcggcggaacaaagccctaattttggaccagtcagccaatttatgatctgcaagcaaagaaaagggggatcagaaggaaatcagaaaatcaggaaattaggaggagaatgaaagggaaagttgggagaaagtggaagggtccaatgctgtccaatgtgccaagtaaattttcggtgaatttgagagtatctagtggtattttgttactccggctatttctgaaattcatatgtatttctctgaagcatcttaaccagagtggcgtcaagatctacgaagaaaggtaacgtatttgcagacatgagacggagcatttgaagtaaactacagatattgcggtcatgctgaacaggtctattgatgcatctaatttgcagacagaagaagtagaactacatgtatcatataagcagatgaagaacaatataagaatttcacaagttagaaaggtagaaaagcgctaggtaccgaagacccgatgaacaaagacaaaatacgaataagaacatatagcttggctcaagcacaaatgtccaactcaccttttcttctgagctttcttcgcttcaatgtcgccttcctccgccttgcgcttcctcgccaccgaccttgtcacgcgacttggaatcgtcccaatcggggcctcaactgaggggacaacaggagtaacatggcccacctcctcaatggcaaaccgcaactgcaaaccttcgtgggtatgaaagcttctaatttgtgagatccggtgggttccacgtcggaaggcccccagaaccaaatgtgccacaatattcccaagctttgtccctagcagggccctgaactcgggggttcccaattgccaatcgcgtatctcctcatctggccagaagaggccattagcctcggtatagagcacatccctgacaaacgaaagggtatccttattgcaaacgtcgaccatatagacatacttcaatgtatcaatcgagaagtgtttctggtaaacggcctggcagacttctgacatgaaaaaaccgggtgctttctttatttcttcaacaatcaacaccccgggcgctatttgcccttcccagatatgaaggtccggatattcggcattgcctgtagcaccaggtccacctatagagatcatttcccatgcaccacttgttggccccattatattgagttgtgcaaattcatcttcaatttggactggaatataggaattcaattgcatatctatttcgaattgcttggacttcctgaggtctttgagttgcagcgtagaaggcttaattggacatgttgccacagacgcgccagattctgggcgttccatccattgctgcagtaattggccagcggcttgtcgttcgccgtatttgagagtggcagaaggcattggaggggagctggaaatttcaaatttggattggtatgtagattgctgtagaaatggtgatatcaacccaaggccttgaagggacattgttgctttatgtatgtcaaatttgttaaccaaggcaacctttatggatattagtgaaccagcgacttgtaggttctgtgctttgaactagtgtttggcctttcaacctgagtgtcatcaacagacaaagacatggactcgaaagaatcgaaatcaaagggctaaatttaaaccatgcagtattcgagaagacgtactacctattgattggactcgagtgcgtacttccggtcataaatagtaacatatgctttcaaaaactgagataatgggtgtttcattgcctttgacatcttgtaagcagtgcaagtaatggtccctatcctcgagaataaagagtcgagataaagagtcgatatactaagcaatgttgaaatcccaaaattagacatgagaacaatgaaggcaaaggttgatgaccgccaagatcgcatcgttggctgctacaatgacaatagattttcaacggacacaacaatgcgatagttaggaacaacactaatgaatatcgatattactagaacatcctcactcctatgatagtcaatagcatagcttgcaactgaagagtttatggcaagtacgattagtcttaaaaaggcttttctttgtccaataatggcagtcgagggtctgatactagcagagttggttctttgtccgttttggtattgcttccgagtcctgtaccgcagttcatatttatctcaaagagctggaaaaaccaaaagaaaagaatgcgcaccttctcacagatgctgtaggggccaagcgccattttcaacgtcccctactcatacgatgtggtcactcctggccgctttcgccgcaaacaactgcgaaccaaactgggaggctaataaagctaatagattcggatgaagcaaagtgccgaggccaaggtgggagttgggaccagtcctttggatttgtcttcttcaatatcccctctgcctctccaattttgtatgcactgcccaaccaccacagaagaagtacctctcccactaacaacaaccctcacggcgcccaatgcatgtctgaatgatgattttagattaccaagccctcaggctggggctgggccaatctaggtcttattaacactacagaatgtctagcacgtgatgagcgccactatcatactattcgcccggcttgcagctggatcctggcctctaagctaactttataggcgagaaagagacaacaagagagatgctgcccttttgtatgtatatggcatcaaatttatagggggttttcggacgctaatatgtcatttagtacacgaagtgtggaggcgccggcgtccgccggcgtgccaagcaatactgtcactaggagttgctaataggccgatccgacatcaatatcgttgatctatacctataccatggatagttctacaggaaaggaaactaagctcgagggcaccaggaggtaataactgagcgcatacggagtccagcttagttgaaaataacccggctgagttttagttctgccttccgctttcatgaggcctacgcctacttttataacgacgcaggtgtatcagatctgcctactctgtaccacgatattaggaaatcaagccactgcagtggagacctcgggcatatcaacgggcgtgatggtaggaaatctctggattgggacacgtgctagaatatggcgtattctggttgcattgccactccgatggctttgcggcttccagagaaggaaggtactatggcttactagaagccaaggaagcattttagcttatcgcaatatagaaccgtgggccaatcctctgttatgaaaaggatggttcgcagatgagaagacaacctactgaactacctacggagtagcaggggcatgaatacaatgccccgatatatttttggcgatttaaggatacactatacgacaacataactatagttactgtttatttatttagttttcgactctgtctttttgtctcacattggattacagccaccttttctcgacctcgggttaccgtcggagaggtgtgaagttagctagtatcctgttatgtgtcccaccatcctatcatgccatggtagatgatcttgtgggatgattaacctgtgtaaacggtcttgatggagtagatggactatcattccatcctatctcgcatccgtcccacgtgcgaaagtccgccaagccttctaagcttggcggacgactggggttggctggactggcttggcattccattcccttggcttggcgaaggggttcaagcttcccaggcaaactccaggattccgcacgtgcaaatctggcctatttcccattcgctcccaaacagaccatgcatctcgcaataatacttctctccaggtacagggattatctcggagatttggatactctggattatcttggcgggaggctcttggcaggaagctcgcctgaaattagcttccaagcaagtcgtacttaacagaggcgctttctcgctgagtgcaaatctctcggtttcatcatcatcccgtcaagatgcgtgcctcttcgatctccgcgttggcatgctttgcctcattcgcggcagcccagactttccagcgtttgggtggttgccctgacttgggatgtatcttcccgccggaccagtacgtgatgtttcaattgcgcctggtttctagctactaatgactatttccagggtcgacttccttgccggtcagtacttcgacatccgtctcgaagtgcactctcccgtcaatggctccgaagctcgtgttggagagcccgacgagaactttaccttcaccgtcgccaagaagggaaaggaagctgtcactgcaccggaatactttaagattgatgaacctgagctggagaggtggaatttcacatggtttgaaggtaataccctcctaccatacagccctggggaacatataagctaatagaaacagaccgattcgccgaggacgcagagaagccctcccttgtcaacgtgacctcgaaggtctatcgcagaattgccctctatgagcctggcgaatacgaggctaccctgacctactacggagaacaaaagacagtcgccaactggtttgttcgtgatctccctagcaagcgacgcgcgaagaacgtcgtgatgttcatcggagacggcatgaccaccaacatgatcactgcagcccgcctcattgcccaccgcagcatcaacggcaaatacctgacaacgatggcaatggacaagttccctgtgctgggacaccagatgacacactccatggactcattcattactgactctgccaactcggccaccgccctttacaccggccacaagaccaccgtcaatgctttgggtgtctatgttgactcctccgaagacactttcgatgacccgaagttcgagacaatcgcagaaatctaccgtcgcaagaacccgaatgccggtgttggcattgtctcaactgccttcttggcagatgccacacctgctggtctgggtgctcacactagcgaccgcggcgactacgaccacgtcatcagcgcctactacgagagcttgaccgactacgagtggacaaactggaacggccccgatgtgctccttggcgctggtgcagagaacttcgtccagtccgaagaaacccgcgattactacaagctcttcgctgagaaagggtacaatgtggcctggaacaacactgccctgagcaacgcccccagcgacgagagactgctgggcgttttttcgaccaacaacctgcccacttggctcgatcgaaacgtctaccagtccaacctttacaaccagagcaactaccccgacggttcggaccgcgacgccgacgacctgcccggcctcaaggagatgaccctcaaggccgtcgacgttctcgacaagcgccaccgcaaggacggctggttcctgatgtccgaggccgccagcatcgacaagcagatgcacactctggactacgaccgctccctcggcgacctcctcgagctcgacgacaccgtccgcgcaaccatcgagaagctcgaggagctgggcgagcttgaggacaccctcatcatcgtcaccgccgaccacggccacggcttcgacgtgaccggctccgtcgacaccgagtacatggaggcgcagacggacgaccgcagcaagcgcaacgcggtcggatactacgagaactccggcttgtctcaatacaccgtcgccggatccaacgccctccgctactccgaaggcgtccacttccccgcccagtgggacccgagatacaccttgcactcgggtgtcggtggcttccctgaccaccgtgaggattaccgcgttaacagcgagggtccccgcacccctgctgttgaggacgagaagaagggatacgttgctaactacaaggatgccgtcactggcttcttggtcaatggaaacatgcccctcgatcagggccagggtgtccactcgctgaccgacgtgccggtctttgcccgtggtccttgccaggagctgttcggaggtgtgtacaactcgatcgatatcttcttccacatggcggaatgcctgggattgtcggagacgaagcgagctggccagcctccgcatgctggaaagcgtgattaaattaattggggagcgttatggtgtcaaataattcgagccacatcttacggctcctgtgtacaagagaagaatacgatgtagatgtagtatgatgtacaagagaagaaaatatgacattatatcaatgagaacattgcgctcagcttgtaatttcaagtaataacatcctttaaatatcaacacctgcgcacgcaagatatacatgtaaagttgaacaccagtctatttacaatggcccagccaattgatgccatatatcagtcaatacttaccaagaacaaatctataaaacaatcatttccaacgctggaaacataacatatgttcaccgtgataaccgagtttaggtggcgttgttggcacaggtccagctagccttggaagagctctcgttgatagccaagcccgagacgtagagtcccaatccgcactagtcttgtcagcaggaaatccagaatcacgcggagagacaagacatacgatagcacaagcaattccaagaatgatcatgttgacaatagtcaggatgatctttccaggcgatgagaaccagtgtccccagttcatgaagagccagaaaatggcaggtagtccgtctgttcgcggttagcaatcgatcttgtcataatgtcttggtctcagaactcgacttacagctgaaccagcttccgaagagggaactctgcacaacaaattagtaagtgtctagtgataaacagcaagaaacctcgggaacatacaatcagactcaacaattcgttgaacacaggaatggactcggcgatgatccacgcaaccgtccaggtactaaggccgatagcgacccatgtacccgtagccaagaaggtcttctggtgcatgtggtgcgaacggtcgccgcggaagattcgaacatagatatacttgcacgcaacgtggccgaaaacaacaccggcaacaatgacctatcaatgattagacatattcccgaaccaactataaggagacaaataacacaccgttgggatggcaagaccgtaggcaaccttcttcatcataggtccagcggaagacagagccggggatgcgacagtcgggccggcatagcagtagatgaccatagcagtcacgacgtacatagtagtatcgataatctgcagcatagcgagggccttggggaaatcggcgggatcctgcatctctgacatgataccgaagaaagagacgtgggcaatgaaggcgaagacgatgttggtgacggccaagaaaccttcctggaaggtcggggtcgtgacgatatcgttctgaacattatcgggggcctggacaccgatggcaaccatcgtgacgatggtagctaccaggatactgatggcggagatgatggacatccagaaaaccttctctgctgtacgcgggagagcggcaagacagctgatgatcaaaccgacaactccgaagacaatggtgcaagtaccgtggttcgtgatggtgttgaacaacacggagaaggtaagaatgtgactggccatcaagaaaatgatgaagagcagttggccgacgaagaaaatctcacgtccgatggggccgagaagaagctcgccggcatcacccatgctgtgtacctgcgggaaacgcttcttgaactggcccatggtgtatccagtgtaccaggagatgccggacaaaaacataatgatgacaaatgccctaagagatggtcagctttctttcctgcgtcgtcgaggcagatattttcttacgggacaattccgagagttgctactgcagacggaagagatagaataccaagcgagatgttctcagcgaccatcactagatgaatatcattagaaaggggttcctgttgattggggttaatgatgggctctcacgggttccagcttgcctgtataaaagtcagaactgtgctcctcaacacaagaaagacagcaagcagagtgagatacttaccaccatggcataatgcgatacttcacttccccagattcttcatttccaaagggatcatcattgggctctaccgggtaggccttcttctccatatcggtagagtcattgtatacttggttgtcctgaacaggatgaggtgcttcagggagactcatgttgaatagtatatgatatggaaaagtgaagaaagaaaaaacgcctggggcgagagaaaagacgcagaaaacggtgtgtggaggcccaaaaaggaacggttggcccagagtttttgcttggcggagataaaggctaagagaagattctattaccagatatgtaatgctagtcgagctgctgactgtggggaggccaaccgtctaatcaggaactcgcttaagcacactctggggggggtgtcctccggggtagaatgccaatgaggttgcaactctgacgacgtttaaaaaatgcgttcatgggtttggctaccgagaccgggacatgattatctaatcgtatcttcaccggtgcgccgtccacatttgtggggtattcggcgtcgggcgagccaaccccgtacgcggtctgcaccccgatcatagatgttaccggcccggcgtacccggcccggcgttgaattccaagaactatctcgataacaagtttaggaaaaaatttagtcaaagatttatgtactctatggattaggtttaccccaacttcaaccccagatcatacagtctgcctctaaaaaggccagttctcaagggaagtttttaaagtaattgtacataaagcttggaaaaagtagaatccaacggtggcgtttagctttgctgcaagtttggcactagaattttctcgaagcaagactcggctacctatcaggcctcggggccgggagactcctcgcattgtttcccaaaaccccgggtcttggcgggttgggctccagtgctgtttcaggggaattggggttgatgaatcccgcatggatccgatccattttctctaggatgcggggtgtgggaatgtttagcgtagaacttgagatctttttattgaatcataatgcaaaggattaactaggcagtttagtgcgaagttcttaatataagtaccttttgtgtggggccgccatacaaaaggtacctagtatctctaaatttccttcgttctttaatcatctactttgatacaagagagatcttcaaagatgacaggttttggcctactgttcaaagtcaaatgatatgttatgacttatgacatcaatttgcctccccatggtgcagtctcattaagaaatgcgggtggcaaaccttgaacataagtatactttgtactgcgttctcatacaaaaggtacttataccaatgaatttgcctcgagccccaagccccatgaagaacttggatctgtcacctcgggcatcctcggaagacctcattgttaaacgggaatatcatcaatttcccctccaatggattgtacgtttgtcttccaaattctccgtctgttctcgaaatgtgtcggttattcagagtatgaatccaattcgggaacccacccgttgtcctcaagcacagagctaggccctcgagggggtaaatatgagatgtaacatcagggcgttctgatgagcgccaccgtcttcgcggacggaagcctccgagtctttttttttccgtttgtcatccttccgaatcgaccgcgggaagcatgaggcgatgcaaagttccgcagtatccggtggcatcttacgacactgatgttgtagaattcactagccgcggtaattatcttccaagtcctcaatgtccaataaagaagggggcggatatgctgaaaggtcagggcgcgacaggggtttcgcagtgtagtactcggactccgtatataaccgctagttgatttatcttccccataactactccgtcgcgttgcataaacattaagttttaacccctttttaaacgaatgcctagtcgtctagtcctaaacctgaatttgttatgctacgtggcaacagtctgacgacgcttcgtcaatcaatatagcgatactaaactgaaatctacgcatccaataaaagaagcaacttcgcgctagaatgatactgtgactcctgggcactgagatcccaggggaatattacggtgatgaaggtgtcttaaatgtctcttttttggaccaagtgtattgaacagaaaccggcacatgtcgctaaaaattaggatcgctttagggtatcttaaacgcagccaaccgacatttccttcgtatttacatgcccgttcttctccaactccatgttttcttctccggtgcctccccgtgattggggaaagagatcggcattaccaaaaatagccgataggccacgatgtcttcctcgcaatgcaactgcaattagcaataccttgctaaatgtgtgccatgcaccacagaacgaataggtttggccgggacacccaaaactcacaccgacgtagctgtatgcagacacagcttcaaaaatgatcctgaaggtagaaaaggccaaggggtcggcttcgaagtgatccgattcggtaattgttatgagaagaatggcgagggagagccaccaaatatcgtggctgaattgagagcgaagttgttggtaaacgaaacgggcgtgaggaaggcctgagaggctcgagcgatgggattctttctgaggcggggctgtgaactgtgtgtttgtgattttggtgctgctatatatgtcagaatggatttgcaagcagttgagattgggggctgccatacctgatagtagctgagactgggaaagcagaaatatactacaaccaggcatgcctgcttagctactgatattttgaacagaagaatcagttctcaccatcatgaagactaaatttcgcttagcaaattgcctattcaatatgggagttccatcttcgggttggaaaaaagcacgtaccgtatagaataagcaacccctgcggcaatcgatcaaatgccacaacagtgaatccaccgccacgcacggctttatccctcgtcagctctaatccgtgatgagtggccagaattaaatacctaatgcctggaagagcccatctaggacccggaacttgaccggaagagagccaatctcctcgttattgatggcagaaacctcgaaagcaccccacatgatggcattgaggaccacgactgtgcccaatataaaccaagtatgccaagcagggtataaataagcgcaggctttttgggattgtgtgagggtaaaatcgaaagatcgtcgccactcctgccaagtgggtttattcggcaacatctgtcttaacgcccagataaggaatcttaataggcaagggaaaagcgtattcccagcaaggataagaacgccgcaggcaagaagcggaaagggtctgtggatcgtgtcaacgaaatgcctcgacaaataactttctgcgacgaatcacccactccttttgataagcgcccatattagtatcaatgagggacatgccgttgttacagagcgctgatgtagcaagaaaagctcccgcccaaaagggggaggctccatcctcccgtggaatgtctgggcggacgaactttgaccagaggccaatgctcacgataccgagaatgaggaagccgatgaaatagagtatgataagtactgccgttaaagcaagtgccctatactctacctcgtctagttctctgtagttggttggcttcttgcaggagaggtgtttgcttgcgcgttgcacaatgccctttagccaggaaatatgtgccttgcggtttccgaggaccttctccttgtcaacaatgagagaggtgacttgttggctctgctcgggatgtttcaggtctgtgacgacgataaagccatagtcgccagacgatccttcaggctcacagggagaggaaacatctggttgaacttctctcactacagtggtggcttttgcgttgcatgtatctttggcagaaagagcaccctgtttgttacaggccacttgattttgcttttccccgtttgagttatctcgcagagcagatcggagcttccaggcacgaaatagagagatgattgcgatgatgggaaaagcatgtccgagaataagaaggcaaaacaaggtgccctgctgtaaactgtttaatgtagacaggtccatcttggagagaaaaaaagtcagccgtcatatcaggatgcgaactatcagtagtggaggacgtaccacgctcagtccagcccctgtcatagcgctgaaacacatgaacaaagcatcggaatagtggagatcatggatatgcgacgaagccgtgtagaatatggcactgccaatggcaggtgtaagaataaagtaggcatagtgcagtgtgagtggactgaatgccaaaagatcagccatgatcggcatactaatgtgggagtcataagcattgtctgagtttagggctgggataccccaaaccatataaaggattatcggattgtacgggccctgcagcagccaaaaatacttctgcttatttttttccgtgaagaacttgaattctcctttcattacaaatgtaaccgtgttattgtctcgtcctcaccgggtcgtttgctaatttcgtcagggaccattcatttctacacttcagccacagggctcagcggcttctaaggtacggcacgctgcattctgcggatgcaaggatcacatttgtggaactgggctatttgggacttttttaagttctgacgaaatgaaatggccagatcgtagccgtcataagattggcgacagccaaacaaacgaatcagatagttctcacattataaaaggttattggggaatgcccagctatacattctaccaagatatcatccactcgcatgatcacgtggctggtcaagctgaatctagggtaaagtgtactaattatgttatgaaaacttatcctgttgaatcttgtgttgacacttgaatgactcggcggtcccgttcaccactgcaccgttatctttttgaacacatgtcatgacctcaagatatgttctcttgtcataatacccccaagccattgttagcagaccagcacatcgttgcactaggggtagccagccttgctcgctatactgggactgtggatggacttggatccagggcataaagctccgagtaatggagatgcctgttcatgccaggatgccgaggtaccgtcccaaggaactgaccaagtcgctgaagctttttcagtagagctacagactagcattcttcaattcaggaaccttgcacatatcctggaagattggggcaaaattaccgaatactagggtgttatctcagcatagtcgcttcgcacattccgtagatatataatgacaaatacgaagctcgcgataattgtgttatagaagatcgaagaaatgtacccacatcggcatagggctgttgggcgcaccgcctacacaagatgcccaggtagctagggttagcaccaccaagacgggatatccgtttccaaggaaacaggttcagcggtggccgctaaccaaacctcatacctgctctgtggtctcatccatacactcagatggagaagttctgaacatataccagttccgcttcatgatactaaagttcatgtcatcacctgtcttaccgtcgcccctaactataattctattgctagagaccccttcttccaacattcttcgtgatatgcagtagactactaaccctataatatcgaatactgcatgggtcatataatccttaattagcactagtaatccctagtactattcattacactaatctactagggatctataatggctactactactaagtaaagcgcacctaataacctgactacctgaggaccatttcgccgatgctacattacgaatgacaaaacacaacaaccgaagggatgtcaacgggatcccagggagtagacatatagcttcagcccaaaaacacagcatcagcctaaataaattcagctcgcatctgtttaaatacaaagtgcaacaagcgatatctttcctcaatcctggctgctcttctcagcccccatcaccaagcaacgctgtcacctgcaccgttttgcttgcagtaatagtttagctcatcacctccgatgtgggatcccttggactcgcaatagtatagcaggtccttctcgttcagaagcgtacaatcggggcatgtatcccattgcttgctaccggtgtttcggttcttataggcagtgcatgccttttcagtggcagctctgttgtaaacctcctagaatgcagttagaaatgctttctcccggtggtacaagtttccaagttgtacttaccactccgtcgccaggggtatcgatgcaaacaccttgagtgtggaggtccgcaaaagcactaccaagtatcagtgtctgttaccaaatacgtcaggttggagaaggccttacccaacagcaagagctgcgataataagtgaaatagacttcatgttgatgattatattatcggaggtgattatcaaactgactttcgaagatcgggtggcagacgtaaatttaaatgatgctagaaatgccagacaagtacgttaaaaaggacctagatagatagtacttctgaattgagtttgtctgtcggaacgtcagattatccaggtcccctttcttgaggtgagacaactaagacaaaatccccgaacaatctccattagaatgatgatctctgttgctcatttccggaattgcatatatgcgtttcattgtcactcctgtcagcctgcaaggtcattagatgtgggctatgtttcaggatgatgtcgacttcttgagttgatctgcaagcgtttagagtttaggtagatattaaggttcccggatatcaccacgtgtaagctgcatatccatggatcgtttaggttactggtacaatgatcaatcattccaatcttcattacaagtgaatgtatatgctcaagatggatttcaatctttataattatattggctttataaagacagtcaaaaatagtcggtttccagcagcgttgctactattccgtatggagcacggagtgcagtttgaaggatgaactggatttggcccccaaggcgtttgtctcacagccacacatctatcagaggatcaacaggatcaacaatgcgccccatagccgttacactccccaggtctcagttgcccgaactttcctcagggccaatggatttgaccagtagattcacgcgtagaggcccatgatctacataaatccttcggacctctcgggcgaagttaaattgattaaaatgtcacaatgtctctccaccatggtttgatatcctcaccggtagatccccggctatttttcggaagtatacgagtgaaacaaggcgggttattgcgtgagtatcctgagattctatgttgttcggagtacggtgatcgcagatctattgcgggaatatagctccggatgatggattcgtctagttcgacaaagtacacaatcttttgtggcagtccggaaacccgttgccttctctgagcgactctaaatagggtctcctttccgtcgtcgattttgcgatatcacttttctcaggatccattattttaccatccctcttcttgttggacaccatgaagttcaaccttgtcttccttgcttctctctgtgccaacagcgcactcgtgtctgccttgccaaccgacacgaccgatgcggctattcttcttctagacgatggtaccacgcagactatcaacaaaagagacctagctacccatctgcctggagtctctctgaccccgcctaccgagactctcccgaagttcatcgagaccgggtccgatgattccgccccctcaaaacgtctgagcaagcgcgccggcgcccagttcatcatccctcttcctgaccagaagttcctcaactgggatatcccaatgtccaccatcgtgcatgccaacgaagccgatgccaccgctgctatggcatcgggccagatggtcgccaacagcatctcggttgctcagtcgtttagcgccaccgtggaaaagttcctgacaatcggcaccaccgtcacctaccagtacaccgaaacggctactctcaccggcacggttaccatgactatcccgaagaacagatggggtgctattgttagcaaccccctggtcgaacgcaagaggggttacgtattcagtggacagcctggaagtggacagtacgagtactaccaggcggattcttacacccatgatacttacagatatggagcgaactccttgtcctgggttaagggtgttgttactacttgcttgggagacggttaccctctgaagcgctgcgtcggagagggtgttttggagtaaatcttcaacttttctgacttcgttcgcatttccaggttgtgaattgtggataattgccacaattccacttcacaatatgtctgtggggcgcagtaagatggccccatggcagaggtcttgatttcctgttactttatgttgtatatatcaatcgtcaattctcaactgaagtactagttccaataaatgtccatttcctggtagatataaaattgagactaaaaggagctttctctctgattttgagaagctaaaggttggatcgtgtgaccggagggcgcatcaaaaatcctcacttttccattccccctctttcgcattcaacactccttagatgattgcttcgccatactccaccggtgcctgaatgtatgaccagccatcacccgttgacccgtccatgagtggactctgcgcgatatgtcagcggcttcacgggcccaggggtccacctagaattccttcaaggctccagggctacagtataggaaggatcattactcgtaccctagggccgacctcggaagtatcttccaaggtgcatatgtaatatccactttctccactcgactccagaacccctgcagttggtctcacaactgcagtgcagatcccacactcccgtccattccgacagtccgctgcctggaataggaatgatctgtgatactcacaccgacagactatccggcaatgcttccatgacctctgcctacgtcttgcgatttctgcaaaatctctagggtctgccggaagtacttttccacgtgcttggggtacatgcagtgcaagtcaggctgggggagatatacgtgagattggaagtgggcttatctatctgaaacatcgtcaagtagtggcgtaacttcggtgttggggactaactaatcttgcgagcagactcaccctggggtatgttttatcatgccttagtcccttcgaagagtcctagttatcttcagcggataggccaaagtgacagtgattagtgtgggtgtcattgaacgcgaaccgctatcgcacttcctcttttgttacacgcaggggtgaccagcaacgcagcttcacaggtaacggggtctggattggatagtttggtgcaggtgaatggagagaaccagtggtcgaggcggggatcgagttgtcaaaggtcgtgtcattcgtagtagacaccaaatccttggcaatcgaatggcgataagggactaaccgagtgaagctcaacagagtagggcatgctagcgagggagctatatataaccaagatcaggaaaatgttgagtatgatcagcagaggaatgtgagcaagacattgttcatagggagacaagtcgataggggatgataatggtcaacagcactatgacaagctattgttttattcgaaaaagcaaacaagaatttgggcccaattcttgggatcgagaggcagctcagggtcatttcttagtgtccttaggaatgaggggtaaatatcgtcttcacctgtcttgcaatccaatctgccttttgccagcgagcctcctgtccaacttgcctttcacacaaccctccaaagcaatttgatgaatacaacgagtacgtcctattcgaacttatataattatcccccaatcgagaccgaccgaccgactacgatatccatccatccatggcaacttcgcctaccaccaccacgcaatacacctcagaacaattcgtcgaaagctgcggagctatcctattcgacctatccacccaaaacaagaccgtgtgtctcatacattaccacgcgaaaaacgaatggctcctcgccaagggacgtcgcaaatgcggcgaatcccgacacgaggccgcactacgcgaagtccgcgaagaaaccggctatcatgcccacctccatcccgtcaggatgtatactcgtgcgcctcctattgatgaacagggacatatgcccgataaacctcgctcttactcggatctcaccgagcccttcatggtaaccatgcggcacttaggtgatagtgtcaatgatgttaagattatttggtggtatattgctgcattggatgaagggtctggtgctggatctgctagggcagaggaggaattcactgcgaaatactttcccttggaggacgcggtaaagaaactcagcttccaggatgatcggactgttcttcagaaagcgatttcattagtggaagattgttaaatcaggtgatgggaagcatgcatttatatggcaaaatttcgaagtcgataaccttacaaactaggtaaggtaagcgctcatctgggatattcctgaggactttggggtagggcttcatacgaaaaactttggcagtctgaatctacgggtgaggtccactaatcaagggattgttatgtagcaatcagggtggtttatttcgagtccgtgagcatctcatctcatctcgtatttgggtatatctatatcggtaatgctccagccaaggaacattcctcagccctcagatctctccggagagtctttcttttgacgccacatcccacagagcaacaacaggaatgggatcgtcgctagcaagataaatgccaccagcgtgaatgtccacccccggcccatggcagtcaacataggatcgatggcagctgaagccccagccgagaagaaagaccgcaccaagttgttggcagcggtagcagcagccgggttagcggtgtgtagatcaaccagcagggtagatgtggaaataaaaccgccagtctgcccaacgccaacgaagaacagaagcacctctggagccgcaagaggcgcaccgtactttaaaacccagccaaacgccagcacggtgacactgccgagaacgacgagtgggatggtaatcatactacgagccttctccacagggatcgaatcctgggttgtgtcttgttcgggactggtagaattggcggctttgttggcagccatgcgtcgatagttccagtccaggagacgccctgtcacaacggaggccacgatagaccctgttcccagcgagatgtagcatagaccaatctcaagctcgtccaggccgtactgcgatgtgtagatctctgtgatagacgagagaaccgtcatgtttccacccatgatgattcccgtcaccaaaagaatgatgatcgagtttggatggaacacaagtttcaggggctttaggggattggggaactggagtttgtgctcaatggttttcttcggcgagtcgctgctgtcaggtcgatcaaagctatccttgtcggaaggatcctgcttgtcgccatgatggcgagagaaaaggtgaatcaagggccgattccatggctgggcaggagacgatccgtcaccaacgacattccgggctgtctcggggaggaagaggaggagaggcaataggaatacgccggaggcgatggttaagaaccagaagatcgatcgccaacccagatattgggctaaaagacctccgataatcggaccaatggcaggtcccatgaaattcccagccatcacaaagcccatcatcgatcctcgttcctgtttcgtgctgatatcagccaccgtagccgcggacagtgccacgctactgctgatcccggaactctgcaggcatctcaatacaatcagagcggcgtagctattctgtaaagccagtccaatgtttgacgcgatatagataataaaacaaatgatataggctggtcggcgacccgttctgtctgcaaagtcaccgatgaacatgggcgcaattccttggaagatctattatagttatccctatccgttaacatgtggattgtgttatttgcgtcgaacgggacaaccttaccatgtaacttgttactgtcaggttgatcatggatgctgatacattgaggtcgttggccagtgtgttcagagctgggaagtagatttgggccgacaaggaggaaaacagaccagccccagcggctgtagcaacgatgtatctttttttggcagtgctaaaggagctgtacggtggaggcagagcctctgcaagcgtgacttccgaattcattactgttcgaatcgttggaacgtgtgtgaaaaggtcgaaacagactgaaagggttgcaatcgcaacatttgacaattatgtgatttttctcgtccccttttccactcgaatcgcagtgaacaggtcatcgtcgatccaggcaacacgtaaaaggccacaacgcaccgtgacgtaaattaggaggagggttccactgcgacaatcggaggaatttggatgatgtgatagaaagtctcgaacacaatgatcgactgctcaaaattgatccatcgaagcgctagtcgttacttagtggtagtattttccacgacgcgtaactttcggcaataatgaggcgtggctttcggcccgggaggcatcggattcatcgggatcaccctacttgggtacttgggtggattgatattcggagaacccctgggctgaagatctgcagggttgagacaagctcacatgccgccgatgggctgtcctgattggccagtttgtctccattagagccacctgggtcccctcgagacccacgtgctcagaagcttgttggcccgttaaaattgcccagtcgattgtccaaagacgatcacttttatcagatcgttcgagaacttccagcgtttcggccatttttatgcaatgaaatcaattgtcctgacgtgcattaacattaaactcaacaagtctgaaagatgccaggagtattagagtattagagtattagactatcaaggacaagatcctgcagataatgaaacctagaacccacatccctgatcttcaatcgtgatgtgctcgcttggatttctagtctcgaattatgtgatgatctgcaaatctcattgtgtaatgaattcaccattgtggccaattaacccgctggcctgaaggcttgtgttgactcaaattagacaagatgctcgtgaagatccacaccggtcgattctatcaagttatattctatttttgcagcgcgtgcagcggaaggtatgatcacaccatcgtatatcgtactccgtacagtgtacgttgtacacatggtccccgttaagcgcataggccagaacattcacatgacgcaagctgagtgtccccttagacgacccctgggtggcatgcaacggataggtcaggaaccgggaggcaattacatcgatatgggccaatcctgccttcttgggcgagccagtacgtgcagcacaaaacgtatacttctctgcagatctattgatcacttgagccggcaatatttaagggaacaggtttcctcgaatcaacccgtcaatcaagtcaattgaaaatccctgaatacattctctgaagggtttaatttcctcaagtccaataccaccgataccctcagctcaaatctcagaccaacatcatggctgaaaacttcgattccgtgccaacggtcactatcatcggtgcagggccctgtggctgtgcctttgcagccgacctggccagccgcggaaaatcagtcatgctatacgcccatcccgatcaccgtggtgggacggatatgatcgagaagaacgatggctggttggatgcagctggggagatcagcggaaaattccagatcaagaccaccagcgacctctatattgccattcgacactctccttttatcgtgaccaccgtaccctcatatggacaagacaccatcttgacattgctgagtcaatttgacctgaaaaaccataccctcatcatcaacgtgggcaatttcttctacctctctgcccgttcgaagatcaacgcccatgcaatcctcgagactgacatctccccttacgccacccgcatccagggtgacactgtctttgtcaagggttgcaagaagactctgtcgatttgggccgagccaccaaacaccacccaagtggagcgacttgaccctcaggccgagctgggcctccgacacaaggtggagatgatcttctctcagaagctagtgtggtgtcagaacctgctcgaggttgggttgaacaacgtcaacccagtcgtgcattgccctgcggcactcatgaacgcgggctggatcgaggctaccaagggcgatttctacttctacgcccaggggatgtcgcccgctgtctcgcgcgtgacagaaaaggtggacaaggagcgtctggcaatttcccacgcctatgggctcgagatcacacccatcacgacctacatgaaccaaaactataacaatgatcgggaatacaccgactaccacgactttgcctcaggctccgtggtccacaacaagactaagagctccccgacctccctgaaccatcgatatttgttggaggatgttctctatggcctggtcccctggtatgagctcggtgtgaagtgtggcttggcttcgccgactatcagagcacttatcgagatggccgcggttgttagcggctttgactactttgagcacggaaggacgttgaagtctgctggacttggtgacgccactaaagagcaggtgcttcatgccttgggtggaccggtggacaagactcctagttctcatgcacccttgccagaatcccctattggaaacaagatggagctgcatactccactgcaaacggctcgagtcggggcgtgatagcccaacgttgttaggaaatatgttcgcgttccaagttgtgtacttactggattttccttgtttttttctgtctgcctgggtcaatttttcaatgatgtgcggccaaaatgttggagtacatctgtggacaaattgggcaagccttatctccattttgaaaacccgccagcttattaaatattgttgtacttatgtgttagatatcccatcccccatggatgcctgatttcacgggctttgtttgctggcagacagagcggttgttgtttcaaaaatgatattcgaagacatctaaggactcactgtagctcttctatcttgtaatgtctacggacattgtccttgccttctttcacagaataccgcaaggattttggcaaggctcactagcactagtgacatgttatacggtgaccgggtaataggctaatgtggtctagtactatatgtccctccataatgctccatatccttcgcggacgaagcccaattgtaccagttcacctcctcacccatgtcaacatggctatcggcttgttcttcagaggtgaagtcagttaacacaccctcatcagaccatagccaaggtacaacggccggggtggcaagctgaccatgagcggcggggtttatatgtccagatccgaatcccgtattagcctccataaccgaactgaagtttgtaggtcctatacttggcactccatacccaaactgtggttcctctgctgcaagatactcaggcccaacagcgaaagctgaggagtgtgtttcagataaattgggagcaggatgcacaattgactgcgctgcagtcggtggattcgacggagtagagaccgaaaacccgggtgtgggtgctttatctttgttttcatcccatcgtatcactagctggcgccactggtcaaggaagagatctgcagaatctgaaccaggtggaaatggcccagtgctcgacgggagtggggcaaagcgatagccctgttccagctcttcggcagcacgagggtcgtttctaagccgcccaaattccatatctcgatactttctggccttggtcatcagctttcggagtggaatccagacgcgaagattcctgttcatgtgtgattgattcggtattagccattgactatgaagggcgacccaggcccgttcagaaagcggcgaccacgggcgtcgagagatctctagcatcatatagacaatggaataccaatgggtgtaggtttggaaagcccagcgccagtgcctacatgcttgctcattgttcagggcatgattgtactcggcaacctcgatactggaaaccaatagtcttgttctcagctcctccgagaagtcttcattcggggaggagaacaatagaggcaggtggataagcagagtcatcttagccataagaagccgagcgaccgtaactaccacccagtatacaatgttccctgagtcggttgagtactgaagaaaatctctttcaagaccttggtatatctgttgcaataagcgactttgctcctctagactcggtgctgcttctttgaacccgtaagccatcatctgccgcgtgatctcgcacatgccgaaggagacgcgcgcaacggacatatcagtcaaggcatcgtgggcttgaggtgtttgctttgactccgggtcgaggtcagcgtcattgaggttaagagggattttagtatcgaagctcgctcttgtgattgtgtaatcggttccttggtcctcggatgctctcacatccaacatgcacagggtccaccagactcttcgtcgcatctcagtctggtatggactcagattattgaagtgtgttccatcacgatgtattcccagggcttgacccattcggattgccagtccagtcatcatccacacaaaactcggactgtcatgtcggcgagcaagactaagaaatatggcaaatgcctgcaccagaacgaagtttggtgcgttcagaaaatcagctcttgcaagcgcatactcgaggccttggcgatatttgagattgaggtcggctttggttgctccgaaattgagcactacctaaatgtagcgagacgtgagccagcggccggcgagagtcgattgctcaagaattggcttacatcttcttcttccatcgatgtgatggcagcgtagtaaatggagaacatcaaagcctcattggtcggtgtgagtcccttcatttcacggccgcgccaatcacgaaccatgtttttgatagtgggaaggtgaacaacttgaaagatgatgttgacgttctcggaaaacacgtctagaaggaacggaatttgagaggggagtggatggatgtcggttagattaggaggaaaaggactcaagttgtgcccgaacaagaaaccgtggcgttctgcaggggcccgttcaagctcatgtgtggaaggggtcatccccggcgaagcctcctcatctgaggtatcggattcccctgatagaaggccacaagcatcggccctgaggtcatcaatctacaatgaaagttagctcgctgtacacaccatgcagtaatgtaaacaaactaaggtccgcatacctcgtcattgactcgagaccagaagccactgctaacgtaccggcttcggttggaaccctggagcaccattcttccaaacttgttttgcacattagcagtactaattgaagatacgttcgattgtcgatcatgcgcggagttttcgggcgagccgaccccggatgacccttcagcagcagagttagttgctaatttggcctgttccagctgaacacgtagctcttggacaaggctttcgaggttgtgaagtctctccatcgcgtcttctgctactggttcagcttcctgggaggcgtgtaggttggataccgcgccgttgaggcggtcgagacggcgagcccatcttggtggacggtctgttggtggaagcacacaagcgctatttgcgcgacggcaattagagcaaggcgctcgcttgtcacagcggactttccgacttcggcatacaatacagctgcgcggcttcagggatgttgtgtttctgcctgaggggtcagatctcgcatctttttcggcattttcagacatcataatcgaatcgaagtcaagtgatggatcataaacgagtcgaaggaatctcggatatcccagtcctggaagtctgactcattagcgtagactgtactccgtggactgcccgagaaaccagcgagggaaggggatttccgcttcgattttcagcccccatttgaatacgagaccgacgcccgttgcattgggtcggatatttttcgctttctggataacgctctgccaaaatgtatatatattatgaagtccatcgtccgatccaagacacttgaaaggaatcatccacctcactttagacgatggcgccaaacaccaagtccgttgcattctttggagctagcacgggcgttggccttgctgccctcaaacacaccctcgctgccggacacaagtgcatcgcactgtgccgtgagccgtcaaaactcacgggcatcttcccttcagggtcaacaccaaatctgaaagtcatcaaaggcaatgcacacaatatctccgctgtgtcccagtgtatccaaaccgacgatggccgcatcgtcgatgttatcgtgtccaccatcggcgccaggccacgcggaatgactgtcgacgatccggacgtctgcaagaaaggcgcggcaactctcctagaagctctagcccagcttcggagcaccggtattaacggaactccgcacataatcggtttcagtacagcgggcttctcccgcttcggtcgcgatgttcctatcgctatggtgcccatctattgcttgtttgtcagtgtccccggggcagacaaggtagtcatggaaaaccgtttcgcgcagagcggggaagcattcacaatacttcgcgcgagccaccttgttgatggcgagtcgaacaaggctatccgtgtgggcatcgaggatcccaagactggtccggagtctagggctattggctatactatctctagggaggatgcagggaggtggcttgctgagaaccttgttttgaagatggacgcaaaatttttgaataagaatgtgactgttacatactgatgcgaatgaaaccggactccgatgaagtaccccgtataacaacatattagtatatatcaatatataggttgattggcttctgcgggaatcgaaagcaagttattcggtagcatatgacgatcttgtagtgggttccaaggtgcttaggctgctggtaggcgtaatttatttggtacttcatccatcactcctgtctaacccttctcctgcctacatggtggggataaactgatgcctgcaatctgcccgactttgtgtcttgagcaagaaaatttgaaggcaccttgtgtgtttctgctgataatatcgactattcttccaggtaccagtaatacttcccgggatcatcccaatgttcctcctattgctttatcgtaaccaacctccttgaaatccatgccctcgagataggctgagttcatgggccccattgaaagagacagttggggatgtatttcctaaagaagttgctgtaacttccacccatacgaccatccaggtcggtgataggagcacggagcttgcattaggcttacatacggaagggtgccggttccacccagttgtaagagccggatattatttatctctgtatgagggccccggcgaaggggtcggtgcagtccacatgggggaccaacttgcgtcgtaagaagtcgtcgaagtcaaggttattacggccgggaatgccgcagaaacgctgaatcatgcaaaatttaaccataatcaggtcttcgtcatttttgatcctggaattgacgaggtgcagcagctcgaggccgcgcaatatcggtgtcgtgagtaacccatcactgttatcttttgattcagagctaaacgtagtatttttcaaaccgcaatgtctccaattttcagaatcgaaggatacccactcactgtgggtattatcatcacgtctccggggttggtgatcaattccggggctccttttacacaaatcatgtgcgaaaatctgcctgcactcgtcatagaagtaaaggagacaggatgcactgcagggtcgcaactgatataagaagtaattgagaatgcgagcaggggtggcgatcctgctattcagagagacagaatcgtacgattcgaggcaatagacgttgcaacagtattggaatcgataaaaagcccacatcagttgtgtgtcgtttgtcctgctcagacactcttcaattctgggaatcagtgagatacatcctgtcttactgaaagtttctccaatctcgactccttttgtcttggtgagattactcgatgttcttttcacgaagcattgcatcaagggttgaacaatcgagcagtgaaatttgaccatagacctggcttcttccatactgagtaatttgtgtagaggattaagcgaagtttgagccaatattgtgtggtagtactggaggatatcttcagcttcttctgggttgtttggcggagctaattttgacgagctggacatctgaacggcgtatgcatcagcaagtgcattacccaatgttgcctccaggcttccacagagtattgtcttccgatctagttggtattgatggaagtaaataggagaggcttgcaccagggccttcagactgtcgatttccactatcaaaagaatatggcgtcggagctcagcaggtagggtctccaacgaagggacctgagagactttcgaagcccgctcggtctcagtcacctgaggcaggttatcatttccatttggagggacaacacgtctcgctttgaaagaaaatagcctcttcaagctcttcctgagttttctgaaaggcatggttgcggacttgaagtggatgtgtgagaggcagtggctgtcgtaggcacaaacaatagaaagagtcacgttggcctagaagagtcttctactccatctacaagcttcccgcacactgggggaagaaagaaggaagaaagttttatcattcactccagcaaatgtaggccttttataggccgcatgtagcaaacaaacactcagtctgccagcaaaaacaggcgtctacgggagacgggaccatctctacaaagacgtccaaaggtgacatacagatctcactctaagttcctaaccacctcagctataccgaatactatttggactggaatgtgcccgatacaccgtcgagtaggtgagcattgctattatgacttgtcatataagatcaatgtgcggcgtaacttacattcaaggtcaattgcttagagcctaatttcccacgaggacttccatgtctgtagatacgaggtgtatacgtacacacggacttttgaaaaggcaaggtatacctttcttggtcttaagaggtataatctaggcaaaatcaggacaggcaatcgtgttaagataatgtattctattatttatattccagagccagccagtgcgctcttggcatagtctatatgcagtgtatatatacagtgtgcgtgacgtcaataagatgaagcaataaaaagcagtataaagcgcgatgaagcaagatggagtcatctaagtatcagtgttggcgcaggtgaagctgttgctgttggcgttcttgctgatagacgtgccagaagcatataagccaagaacgcacagggccaaaccgaagcaggcaatgccgatgttgagaatggtgaggagaatcttccggggagaggcgaaccactcgccgcggttgaggtggagccagtagataccggatagaccgtagctgaaccaggaagcgaaaagagcactgatcaaactgttcaggtcgctgaaaacaggaatagcctcggagataatccacgcaacaacccagcaagccacaccaagaccaatccaaagaccgacggaacgcttgttgcgctggtgcatcagatccgatttggcacagaggcggaagtagatgtacttcaagccaatatggccgttgacaacaccggcaccgacaatggtggggatagcaacaccgtaagcgatcttgctcatcaggggtccggcggaggtgagggcgggggaatgcacatccgtgccaatgtagaagtaaatcacaacggcggcggacaggtagagggcgatctcaaagccctggagcatgaacaaggacttcttgaaatcctggggcgtctccatctcggcaatcaaaccgaagaaagcgacgtgggcgcagtaagcgaaaacgatgtttgaaacagactggaacgcggtgtacaggttggtctcgactgtggcctggattacacgatcggggtggctctggactcccaccgaaaccatagtgatgacaacagcgctcaagatgctgaggaatgatgcaaatgaaatccaagtcatgcccttcattgtacgggggatggacaggaggagcgagataaccataccgacgacactgaacacaatggagcaggcgccatggttggtgagtgtgttcatcatgacgcggaaggtcaggatgtggctgcccatgacgaagatacagaagaggaactggccagtaccgaacagctcacggccgaacttgcctagcaagatctcgccggcatcacccaggttttgaatatgagggtaccgttcgcggaagaggccaatattgtagccagtgtatgttgcgagaattccaaggccgacaatcaggatgacaccagggacaaggcccagggtagcgacggctgcgggcagcgacaacacacccagtgaaactgactcacaaatcatgagcaagccacattgcctgaagacaccactcgttagcacggttgataaagcctctgttcccgacgatagactatacataccaccacttcaaggtcttatacttaatctcagcgtactcctcgttgccaaacgcatcgtggacctcaccagacttgagctggccctcctcatccaatggcagatccttccgctcagcgatcttatcctgctcataagcaggtggtgctgtgttgacctccatggatgttgaagatgggggaaaggcagaggttaaaggggggttagtgaggtttagttagggtcagtgggagatgtggccctcttattctaaggcttccccgttctcgcgtgcctttcctaagcagggaattttagaaaattgccccacgggaagaaatggaaggttccgcagaaattcgatgcaaccccaacggatccaccaatgactgtgtccgaatccggcgggtttgccttgctgactcattctaattggtgataactagaaattggtttgtaaaagctaattatgtactccggtaattctgcccaggtgctccagtttaaactggggggccacagtcccacctgatcgtttcgttgaagatcgctattatttggttggagaccgttgaaaaagcagtaatgtatcttcatatatatagatatgttattaagacgctgtaagctgtggcttttattcttatatcgaatagcctttttttcccgggcctagtttcttcacccggactcggcgcggattcggaattttgcctttctcaccgagtcaccgagtggcgactcaaaacgccccacccgaactccggaggacagagccaactccggtttttggctttcttaagaggctgggtacatatacccgatactaattaaaatggccccgttatttccgcctagtattttatcccccggattatagatcatgtctaacacgtggtggttctacgtcgagcaagctctaacgttttggtcttgtgatgttaataacatgcgataaactgccaaattgatatccatagaaattgattgactggtcctcttgggaacatatagattttgtattagaccagaatattgacatttgcttcatcttggcgtggcctgtccccctgtcgtctcttcgattgttcagttggggtatcaagtaaatagacgttggggaactccagactaccccaacctcaggagaacgatacggagagatgaaaagtccggagaaagtctatgttgtagcagaggcacagcgaacacggggtcacagcactgacctcgagattcattgatcaaacattggttgttcccgggatcggcccataatactatgcatatgtcagcaggtgcaggtgcaggtctgtacctgccgttcttggactagtgaatcttggaacattcgttggcccaaattcggattagcgtggacttttgtcaccgcatcgcaagtcagacacgaacgcaacgggtctagccaagctactcgtggattttggactttgatatcaatatacaagaaagggttcattccataccatcccggcgactctgtgcatcgctatatggcatgactccacagccgccatccatcaatccttcaacatggcagccatcaccacagcctctatcagacatggagggtatgctggatgcaaatgacccaaccgggttcatgcaagaagacccttatcctggtataaatactgaccatgaattccaaccatttctctcagacatcggtggtctagaatggtcacagtggacaaattatgagtcacacctcgtatcaaccgccgatacacaacgcggacatcaagaacatgagggactgaaggccccagaaaatgtatacgattgttctccaactttagcagaagaaaatgttgacccatccttgttgcaaccaaacctcaccaatgtctcacagtggcttgatggggcatatcgtcctcccgtgtcatgcgcccattgtcgtaggcatcggctgcaatgtctgatacttcgcaccacgcctgccaatccaaatcccagaaatgcctgctcaagctgcgtggcccttttccgggaatgcagcttagcaaagggagagaaacgcctcccgtcgggctttgaaactttctctccggtgttgggtcatctccacggtgtgccagaagatggaaatccgttgcccgctaccactgtggacaatggtgatgaacgaaaagaacccaaacaatttctcagaaaaggagctagagttctccgtgagtggttctatcaaaatcaagattatccttatccaacagatgcacaaaagaatcagatggcccacgagactggcttctcccaaaagcgcatatcaacctggtttgcaaacgcccgtcgccgtcagaaacaaaagatccagagtgtgggactttcttcgacatcccgtacccgctcgggctcccccatggtcagcagcacgctgtcttccctaactcctatggagcgatggcaggcttccccgccagaagatgaacctgttccagaaacagcaattcaaaatgccattgcctccggctcggtagagccggacgacagcattgacccgttccagctcgatgggtctgccatggatttcttcaatttcgacgagagctcgtcgcacttggcgtcctcggtatcgagcattgggagcaaggcatccgagacatctgatagcgcctcttcagcatggagctatcattcctcggcagacacggggctgccattcccactactccccaaacaaatcaaacccaaacgcattcgaggacggcaacgagcagccgtagactatcattaccagtgcactttttgtacgcagtctttcaagaagaaacacgactgggcccggcacgagaaaagtgtccatctcactcttgactcctgggtctgcacgccaaatcttaacgacgtccaacaagcgttcgaactccaattttctgaatgccctttctgcgacgtcctcttcccaacgcctgcccattgggaagagcatgaattccaagtttgtgccgataagcctgcccaagagcgaacattcagtcgaaaggattatctatggcagcatctgcgcaagttccacagctgcaccaaagtccccgtggctgacctgggagcctggcgcggatcgggcgtcaacgtcgaaagccgatgtggattctgtggatgttcactgtccacctggccagctcgggcagagcatctggccggtcatttcaagaaagggtctcgtatggatcaatggcaaggtgattggggtctggatgcgtctgccttgggtgtcttacgcaacgcggtcccaccatctcagcgagctatcgcaaacatgtctatttagcatctatcaaaaagttgtatacgaataatgaaataataatcacataatatatgccattgaaatgctcataccgcgctgatcgttaacgaagctacatactcaagctactctagtatgtcgtagtctgccattcgcgattgtaccaagtccccatgcccaacataaacagcagaaggctaccatccctcacaacatctttgaaaagctgcactcccattcccataccacccgactgcccaccaagcagcaccttaccgccagtcaacagcagctctcccgtcataaagatcgcaaagggattctgtgcagtcgcaggcttgggcgggggactaccgaacaacgcaaccgaagtcccaataatgaacagcaggtaaacagcaaccgccaaagcaaaaacggtgtgcagcgtcttccaaatccgagtgcgcttctgctccgcctctgtcggcggcgtcgctccacccagcatagtggcaatgaaaggcggcacgccgagcattgatgcgatagcagcgggtgagaatccgggcgtggcttggttgccaggtgctcctgccggggcattggggccaccgccgggcatagcacccatgagagagttcaaaagttcgacggtggggtcttcggcgtggtcgggcggctggccctgtccttggtcctgtgcggattgtctcaacattgcgcggaacgcttcttggtgtgtctggatgtcatttggcgcttgcgggtcgggatgcaggccctggccttgttccggtgcggattgtcggagcattgaaaagaacgcttcctgctgggcgcggatcgcctccggtgattgcatgtctggttgaggcgagggtgagggtcggaactggggattttgcggtgctggagagggagaggcggacattgcgcgctgggtctgaggggatggagagacttcgcggtctgttgtagttgactttggttagccttgtttgtactggcgtggctgatgagagggtatgtctgctttggtatcgggggctccttggctagagccggggatgcggttttcggttcttaccagcttgcggcgtgcgtccactgagactggtgattttgtccaggcgtgctgagcctccttccttgatctttgcctcgcggcgctcgcggcgcaggcgggcagatcgctgtgctggtgattcgtctgccatcgttgcgggatcttcgaaaagctgattacagctgctgggactgggaaatgacggggatgggtgtgctagatattagcgataataagtgggatgttgttcggcgaaggtggcctggatgtggccgatcagccccggctgtttagtcctgtggcgataagaacaccagccacaacacttcctctacaagcttggaagaatcaacaaccacacctggctgtttttattaaaattattcacttatcaaataatgcatttttctcaagctgtcttcagctgctacacaatatcaagcatgcacaaggaactttgaactttgttctgagctctacttatatacagacgtctatattcaataacaaaagtcctgcacaagtcgagtatacaccttctcaaactgttgaagactttcaacttcaacccattcctctttcgcatggaggccctctcctgccgggccatacacaatggacgtgatacccacagcaccgagcaaggcggcatcagtccagaacgggccagccttaacagcaggcttgctccccagcacagcagtggtacaagcagttgctttctccacgaacggatgatcagcagccaccttctgtgtagggcgcgacatggtaatgcgcggctcagagtatttgaacccagatttctgctcggcgatctctttcagcagtgcgctgatgtctcctaggatggactgtttcgtttgggctggaacagtgcggaattcgacggtgacagtgcactttcccggataggatgaaggctcttcaccaccccgaattaagccacagtgtagcgaaccctgacccaagagatcgtctactggaagctgtgattggtacttctccaaagcctgcaaaaaggatccggcatacaggatggcatcttctcctgatgcagggtcggacccatgcgcagcaacccctaggatatcgacttccacccacacgaatcccttgtgggcagtaaggatcgcgccttgggttggctcgggaagtacagcagcatcagcacgccagccagcctcaataacatcgtgagttccctgtgaagcatcctcttcgtctgatactgcagccactatgacatcaccccgaggtacgcggccgctagctttggttgctgcaagcgcagctaatcctgcagccaaaccccccttcatatcgaggcagccccggccaaagacaacctctttgccattcttggttccaatacatccggacaagggatcttcctcgtagctggagagactaactgtgtctgtgtggccgttgaacatcagagacttgccacctccgctgcctcgcaagactcccacaatggatggtcgtccagcgaccttctcaatccagtgatactcaatgtctcgatgggtgaaccaggcggccaggtagtttgcgatttcggtctcacccacgccgtctgttacagacaaggttgggttggaagagttgatctgagtgagagtttgggttaagcccacgacatcgtcaacggagacgtcttttgggactggatactcgcgcgcaccttcagtgcttagaagaatgaccacagaatccttgttgagaagtgagctggcctctttcgatgtagccagtcgtcgcagtgcagccaacgatgcacctccacatgggccagcagccacagccttggaagtcagatattgcacagcacaatggctctcataggatgagacggtgacgcaggcatcaaccaaacgctgcagatcgggccaggcagtagaagatactgtcccacaatccataccatccataatcgtagaagaagttcggacagtaaccggctttccagtagtcaagctagaagataaacaggcagccgtgtcaggctcaacggcgaccacagacatgggcgtgctctgtgacttgcaatgcttcgcgactgcatgcgctaagctgcccaccccagcaggggtgatcatcatactacccaacagaccaagccgagaaagttcattctggacttcgtgcatcatggtagaatatccctcgacgatccacgaagggacatcttcatacccctcaaacgccgtatcctgaatgataattacaccctgtcccacacgcgtctcatccacagccttctgcaccgcctgatcataatcgccctgaacaacaatcaaccgagccccttctccagtgataagatcccgagtccactggttcagagaccgaggaacgaagatccgcgcctcgatgccgagaagtcgagccataaacgcaaccgcccgtccgtggtttcccatcgaggcagtcgacaagataattgatgcttctttcgctcggtttgagagttcatcgagcgagaccgtagagggcaggccgagttgcgctgcaatcgctcggaaacatccccatgacgcgcccaaaactttgaatgaaggtaggccgaaccggctgctctcgtctttcacgagaacgttgccaacgcctagctcagcggcgagctctgggagttggactagtggggttggagcgtagttggggaaggattggtggaatgccgttagaccttcgatttgcggggaggcactgctcgcatttgcggccgcggggttgaagtagattgaccgtcgtgatgacatgttgatatatgtttgatatgcttagtaggtaattgatctgtgcacattgcagatactttatttattgccgtgtcattgcctgtaatctgagccttctgaagacatcgcgccttctgacgacacgtcgggttgagtgatgtcggatcaggtgggcactgcgccttctcacaacaccgacgcctttaacctttttcttttcttttgtgggagtttcgtggaaatctttaagggcctacattctctttgttccatttggcaggatcctctatatcggaatctgcgctagcgcttgtacacagtttggtataaatgtacgacccgaatatcttggagttttcaatctcagtatacttgtttctgtctagataatcatggcagccttcccatatagcataatttaattaggtctgcttaacgccaagataattgaaaatatcgattacttttgcccttcagcctctaccctgaatttatcgtagtgaacaacagcctcaagaagagcttgagtgcccatagcactgcgattgtcagattctggagaactccaagggaaaaaaagacttaccaatcctgtggactgcaatattctgtcgggtggtggctcacaccatcccggcaagggacaaagatcatcgcggagggacagtgctggctagtataaacagtatcatgaccggcgccactagtcatgagcatcgacttctcacgaccaaccagctggtccgccgcagcctggatcgacgccacgcagttatcgtcgaacttgacagccggcgagtccgtatccaacgtccagtcgaaggacacacccttgccatcttgcaatgcaatagcctcaaatgccttgagacattcgtcctgcacggcgtgtaccacactatcctgcgggtgtcggatatcaagagtgaaggttacctgggatgagatggtgttcgtagacgcgtttgatggaacccggataataccagtcgaggctagcgcgtcgtgtcgcttagcaatatcatgcgaagcggcgatcatcctagatgatgcaagcaatggatcccggcgggcactaagcggtgttgttccagtgtgcgcatcctgaccctgaacggtcatattcaaccatctataggactgggcgccccggacaacaccgattgatcggttattttccgggaggattgggccctgttcaatgtgcagctcgaagtgagctcctagggggtatccagttgctagatcgctagaacaagcaatatcgcccaaatatccgtgtctttcaagctcggagcggagagtcacacttggatcgtgaatgtcgcgcaggtcccaagcttgttggattgggatggcaccagcccaaacacccgatgagcacatggatttggggaatcgtgcaccttcctcgctgtggattcgttagtaacaatcccaaatggcacgataaagcagatttctatacttacttggtccagttgaccactccgacatcatagttagtctggaacccactttccttcatcgtccgaaggacctcaagggcagccatgataccgagaataccatcgtaccgaccacctcgcggctgggtgtcgaggtgacttcccattgcgatcattggggcagccgagttcaaccgccctggttgccgcgcaaacatatttcccatctggtccacagaaagagtgcaccccagcttctggacttcagcgccgaaccaccgacgaacgcgggcatcatcatcattgagagtcagacgagccatccctgtatcagttggctttctgttatgtcgttagattgtgttcagtgaccgtataggagattggtacatactcgccatagcgatgcgcagcaccccattcacatgtctcgtgaagggtgttccataagcggtccgaattaatcttgagacctgacgcttgtagtcgagtggcagtagagaactgccgggcattggaatgaagggcgcgtgttacgccttttgtgccgtacattttgcggacaaagtcacaccggtcaaacagccggcctatttagaatggcctgtctaatttgaagcagatggctgtagctgaagagtttagatgtaaaagggtcttgttttagaaatcgtcctcttaaggtccgagaccactcaccaatatatgacactagcagcgccttcccataacaggtgtggatacggtcgcagggatgatcgaagtcgctaggctgattattggattagatactatgatttccacatgtgcagccctggaggtaatggcccaaaatacctacaacataaggccattggcaagttccaaggttaacggggtcatatctgggggaaatggatggcaaggtgatttgtctttttttcgctatctccaaagacgggtctagctcgaatataaccgagtgttctcgtctatactatagtcactcgggagtcaacagtaatccgacctcataggctagtgtgaacgtggaattaatgttctgaccctacaggtggcccatccctagccattactgacccgactgagtacataaggcaaccccaaccctattcaaacggcagcttaatgaattcgcaaacaaatcctattcaatcacaactaccaacccctttccactcgcaaaacatccaatagcatccaataccgttcgagtactcacaagttcatcaattctcagttcagtatcaagcataaaatttcatcaaatagctaccaactgcttttcaatcacaaatattcgctcagaagaatccaaatccattatccacaagtacagcatccaaaacccaaccatccaaaaccctagtgttcacaagtttcagcatccgcatgaatgccaagacggtaaaacaatcggccgcatgaagggggagtttcagacctccaatctcgagctcccctgcagctgacaatctggaaaaagaacaccagcagtctgatatgctccgagtctggcggcggttgggagccccctcgtcaataattcagcattgtcgattccgttgcccatctcgaacattatccgacatgggaaacaagaacagcgcaccttcgccacatacctggctcgacggcacatccccaggaacagattcgcaagaactgactcgtcgttagtagcatacactcaccggccttgaccaaggtgttaatttatccccgactttgcattgtaggatatgatccgcattcgtacaccggtgggagatggctcaatcgggatgagctcgagcgaaactctcgccacgttatgtttgacttctcagcgctgtgtgagcgggctgcttacacatgtccaggagccaccagcgttgtcaaatatgagaagcgagaaggtgggttcaacagagtcttcctcttaacaatggacaatggatcgtgtgttgtggcaagagtacctatgcctattgctggcccatcaaggttagcgaccaactctgaagttgcaactatcacatattgtaaggctaagccgcatcccctgtccttgagggtatggctctgacatgctcactaattcatgccggtatagtacgatccaagatctcgcttccgataccgaaaattctcgactggaatgatgatccttccaatccggctggaactgaatatattatccaggagcatgtagcgggtgttcaactacatcaagagtggcataaaatgaacccggaacaacatatgctgtgcaccaaagcgctttcattgacaataaaaaagatggcttccctagacttcccggcctatggcagtctatacttcgcagatgcacctctagactcggacttaaagattccattcgagcaggggttctgtgtgggaccacattgcagtccggttttctggaaccgaaatccgggggaacatgaactctaccgtggcccaagtcccaattgcggaccttggagagatctcacaagttattgccgaggtttgatagataccggtttctctcgtttgcccaaagaagccgtcaataatcgcaagcttctgccatatcaaggatcaattcaagatcacgtccgtctattgaaaacaagtcgagaggtgatacaaaagttgagtgaagatgaacgcgttaaggacgctgctacaccagctctgcttcacccggattttcacaagaggaatatctacgtctctgccgaggaaccaaccgttattactggcctaatagattggcaatcaaccagcattgagcccgcgttcatttatgccaacgagacacctgatttcgctgcactcccgatggtccccgaggcagatccactcgaggacgaacaagatgaaacagaaatttctagacaaaaggaacgagaactaaaggatgcatccgcctgttatcaaacatatgatgtggtcatgacggcccttgttcctaaacttcgtcctgcaagattacttgatccgaccctttttcgactcttccactactgtcacacaacttggagagattcggctgtcgctgtccgccaagagttaattgagctttcagctcgctgggcggaactggggctagagggctcatgtccatattctcccacagaagcggaattgaaacagcacgctcgagactatgaagattttgaggctgttcaagcactcaagtcatggctaagggacaaccttgatacaaattctgacgggtggatctcgagtgatgcgtgggacgctgcgagggtagctcatcgcgcagcgtatgatgaatggatacagactgccaaagaagccgagtcccgtggcgaagacatgacagtagcgaaggcggacaagatgtggccatttgatgctagataggaactagggagaggtaatcaaaatagccagctggtctctgtctctagggtctagtctaaacccaggccctgcccttacgttagcttttcgacaggatatgacggcctgatgtttgtttctgcctggctaggcaatttttaagtagatctcggctttgggtgcgtagcttctgggaacttggttggctcctctacgtctgaacagctccttggctgttgtagatgtcgtagcagtatattcaaccgtacaatatttacaatagtagtccaaagggtctcgagcttaatgatactccggccccgtctaaaagtcatgtggtccacgcgttagcgcgccgttagtctaagtatacgacatatgtacgacagacaaggccacatggtgaatttagcgcaggtgtgactttaagtggaccggcactggacgggtttggcgcgaaatacagtgcttttctcaacatgttaactctgtacatctccggcccttcccccgtggaatgggaattttcttgtacaatatatgttttgttgggacattgagcaaagaatggagtaaacgcggtcttttctcgggcctctttcctctgcgttaaaaattggcggggctcgaagatacgcttgtattgaaactggcttctcccctgatccgcgaccccggaccttggctgaagtacctaggttgtgttggactcggacaaagggttcaacgagaacaactgggctgtggtcggttaaacttggcgtttcttcccgactataaacgcgccaatgaggggacctgatctgagtcgaaatctttggaggggtaagcttaccccggagcaacggaaagaacccccgcatggccgaacccaaactcgtatgggacaaggcaatttactgaaatttactgaaatttactgaattggaccgtattcggaatgtatcttattcctgattcggagatgagagtggatcgtccgaatgtccaatgcacaatgtactttctctaggccgtctgcggctagcgagacagccggagttgggtagtttgaagtggtattgtaacttattgtaatttattgtaaggggcacggaccactgatgaaaagggaagtggcacatcctcccgggacagctggactactaatattgtcgcgagtcccccctccttgagtttctttttctctttctcttctctaatatcttctctaattgctatacataccctgtttgatcattactcttagtatattatatagttcatcccccacatttattattcccattggactaccgcaatcatgtcggacggcccaattcagcctcccaagcccgcagtggtaagaatcaccgacctccagaccgagatgaccagacccgtgtcgcactggtgaccgaagtatcatgggctaactggtgatataggtgcatgaggcacacgaggtcgacactttccacgtccccaaggcgttccacgataagcacccctccggcactcacatcaaggacattgaggagtacaagaagctttacgaagaatcaatcaagagccccgacaccttctgggcacgcatggcccgcgagctcctcacatttgacaaggactttgaaaccacacatcacggctcgtttgagaacggcgacaatgcctggttcgtcgagggtcggttgaacgcatcgttcaactgtgtcgatcgccatgccctcaagaacccagataaggtcgccattatttatgaggccgacgagcccaacgagggccgtaagatcacctacggagagctgatgcgcgaggtgtcccgggttgcctggactctgaaggagcgtggcgtcaagaagggcgacacggtcggtatctacctgcccatgattcccgaggccgtaatcgctttcctggcttgctcgcgtattggtgccgtgcactccgttgtcttcgctggtttctcttccgactccctccgggaccgtgtcctggacgcctcctccaaggtcatcattacctccgacgagggcaagcgcggtggcaagatcattggcactaagaagattgtggacgaggccatgaagcagtgccccgatgtgcacaccgtgctggtgtacaagcgcaccggtgccgaggtgccctggaccgctggccgtgacatttggtggcacgaggaggtcgagaagtaccccaactacctcgcccctgagtcggtcagctccgaggatcctctcttcctgttgtacacctccggttccaccggtaagcccaagggtgttatgcacaccactgccggttacctgctcggtgcggccatgactggaaagtacgtgtttgatatccacgacgatgatcgctacttctgcggtggtgatgtcggttggattacaggtcacacctatgtcgtgtacgcccctctattgcttggctgcgccaccgtcgtgttcgagagtacccccgcctaccctaacttctcgcgctactgggatgtcattgacaagcacgacgtcacacaattctacgttgcacccaccgctctgcgtctgctgaagcgcgctggagatgagcacattcaccacaagatgcacagtctgcgtattcttggctccgtcggagagcccattgccgcggaagtctggaagtggtacttcgagtgtgttggcaaggaggaagctcacatctgcgacgttcgttcccccttacccttggaccttttggaataacttctaatttttggatctgtagacatactggcaaaccgagaccggctcacatgtcatcacccctctcggcggtatcacccccaccaagcccggcagtgcctccctacccttcttcggtatcgagcctgccattatcgaccccgtctccggagaggagattgtcggcaatgatgtcgagggtgttttggccttcaagcagccgtggcccagcatggcccgcaccgtgtggggtgcccacaagcgttacatggacacttacttgaacgtgtacaagggttactacgtaagacgcttcgcagcctgccttgcagggttgatactaactcatatatagttcaccggagatggtgctggccgtgaccacgacggctattactggatccgcggtcgtgttgacgatgtcgtcaacgtttctggacaccgtctgtccaccgctgagatcgaggccgctcttctcgagcaccgtaagtccaaccacagtatctgccaaaaattgcaactgagcccaaactaactatgaacagcttccgttgccgaggctgctgtcgttggtattgccgacgagctgaccggtcaggctgtcaatgcctttgtctctctcaaggagggcaagcccacagaacagatcagcaaggaccttgcaatgcaagttcgcaagtccattggtcccttcgccgcccccaaggctgtcttcgtcgtggatgacctccccaagacccgcagtggcaagatcatgcgccgaatcctccggaagattctcagtggcgaggaggacagcctcggtgatacatcaacggtaagcatcatctctcagcaagatagtacccgcaatcgtatcgtccgaacaatagctaacgaaatattcttcacagctctccgaccccagtgtcgtggacaagatcatagaaaccgtccacagtgctcgccagaagtaaagtgaaagtctatgaatatgatgataatgacgtcggagagcaaaatttctggtgaattttggaagtagtatgatggtcctctgcggatcatacgccctcgacctcggtccacttggttcatgctggaatcggacttgaccatgcgggtggttttcttttcttttctttttttggccggttttcagaatcactgcttgtacttgagattcccttggctcgctcagaagcgatttgaatagtattattttttgccttcttgtatacttcggctctctcctttgactcatcaatatgaatcgtacctaggtataagagcatctttacgggtggagccattgacggaactccatgacgccgttgaatgcgccttgagctacttatagggggccgggggatgtggtagaaggcgatggatcatgacttgaaaccatacagatgctggtgcaggactgcactgggttcccgcgcgtatgcttctaatataaacgttctgtgacgcatcttttcaattctgcggaagggtcaagaattcttgcagaagctatggccataggtagactcaattagtggctgtccaacaacaaccggcggctttgtcacttagctcctgctgggtggctggagcaacatcctgcttgaaatcaaaactggaccatgtgcaaatgccatttgtaaggcatggtacttgacggaaatctttcaatgtagttgttgctagagtcgtccaccaactgtataccaccaactgtatataatgcctatctacccggccccggaccgtgggtggcaatttgttgattatagaaacagcgttctacacagcatgtatgtgtgagaacaaaaatagtatatgaaaaatactatgaatatgaaaattccaattttgtatactgcagagagtaaataaatgttttgtctatcttctttatatatgggaagaagcatctatttatgcttctttttcgtatacctccaacatgagagatcggaaagactcggtgagaaatgacaagaaatgacaacgacgagaagagctaaaagctgacagcagtgcgctaatgcagtgagatgacagtctgtatactgaggacaacaatgtcatgatcaaactgtatatagccaagggttctaggcttcttttgataggagcctgaggtacacagatcggtgcaacaatgagccggctcggcgacattcgtataatcaggctgccatttttgggtggacacgaactttcgaacaaagtccccgatagggcagtctagtaggacattttgtataaaatcggcaacgatgcctgcatctggcatgcaccgtcataacacttgatcaagattgtcagaacttcaaaatatcatcaccatcatgagcgttagcccgaatcgcaccatcgccatcgtcggcgtaggctcgagcatctctcggtcgcttgctctgtggctcgcaagcgttggctggaacatcgccctcgtgtctcgctccgagaacagcctatccaagatcgccgacgaggtcaaagccgcccagacaagccccgacgccaaagtggtctaccgcaccgccgatgccggcaaccctgacagcctcacagccgccctggactggtgtgcccaagagctcggtggcaagctggacgtcctgcactacaatgccgcccgcgtcgccgagtcgcacatcaccgaggtcacaccgaagatgctggagctcgacctccgagtctccgcaatcggcaccctcgtcgcgggccagtggttcacccgcaacgccaacacagatcatgtctccaagggcgagttgccgctcttcctggtcaccggcggtacacttgacaaggagccgcaggtgggcgtctcttcgctgtctgctgccaaggcagcgtcgcaaacactcagtcgcctctttgcgcaggcgctccctcaggcttcccaggttgtggtcggtatgccgctgattaaagggcgcattgttgacccagaaactggcggcttcaccgatggctaccatcccgataccatcattcagaaggtgtttaagccatttttcgaagaccgcgagcagctgcgggatggagtttacaactggacggtggagcgtgttctttgacagaactgagatttctcgtgacttgtatggaagtgtgtgtcaaaaggttttgactcgacgctactggtaacctccagcagattacatacgaattctcacatgtccacgggtgcatatatgtacatacatagtagtagtcgctgctgttttgtagtgttaccgtacaagggtatcctgcggtctcatcccgcttaatgagtatatcagcactggcttgcgatctcatagagaataatgtgcaattctcgcagataatgacttgtttccaattatcttttggggattgactaattaatggtagtctatagttgcctccggggcatggatgtccgacggcctgttgtggtcctgcatgagaccagctgatatgcgcacgtggcagtagcgatcacatctaagattcgagatgattggatgtagatgatacgctactacaacatatatgatactgtcggttacaaggtgctcgatatatctgggcctataccattcttttcatttcaacccttggaaggctctgtaataatagaaatcaatcacgtatactctttggaagtaagatttgggtcgaattgttgaaggcagaaatggatcgaagattatttacaagtcacaaatataataagaatcgtaaaaattgagattgtttagggaattctgggctataaactaggctcgagggaatgtatacatcacctgtgcgagtgtgtttcacctccggatcacctgtgaatgacaatacatactcgttaaacaatgaaagattccgcctcgagcttctttgacaatcaatgagtcatttgtcaataaacagaccgaagacaagggtattgtccgctattgtcttgctctgaaccgcattcattggagaaaagtccgatttaggcagctatcacgtgacagagcattgcccggaccttacctaacacaggtctccggcaaacttagctcttcttttctgtcgcgtcttctccctctcttcttcatccccgcgcaactcctgctcgcaattcttcttctattaatctgcactctctcgaaactgcgcgcaatcaacctatgacttcgtgaacacccgacaaactccaaccgacatcatgtctttcggatttggagggttcggtcagaacaaccaaagcagcggctttggcactggcactggctttggatctggcactagcactggaggtaggtctttccctgttccccttttcggattccccttgtgtttccagcccctattcccatctctctcccctactcgtgtcctcggattttccctatctcgacaaccggtgctcctaattccgacccgcgatggtgccacgcgcaaggcgaaaaatatcagcatagcaaccttcgccgtgcgatcgaaaatcacctgcggaccatttggatgcattagcgacaccacgacaagataaggaatgcaagggcttcttcgaatccaagtctctctgaccgcgatcccctccgtcatctaggctttggctcgacagcatccccgttcggaggtgccacatctggcacttcaggtggtggcgccttcggcggtggcgcttccaacacatctactggcttcggaaccggttccggcactggcggaggtacgtgctcaatcatattgagctttgcgctgctctctcgattttccctggcgagattccccgttgcagcaaatggacttgcgattcagacgctcccgcactgatcgcgcacgtggaatccgtgaacttgctcttcggccccctctggagtgatcgctcgtggccctcctggaattgccactatcctgcgacttgcccacatcttggtcgagatgcgcccgaggacctctctttatcaatttgcacttgcttgattgcttcattgaagggattgatcgtgtttactaacttactttttattaggattcggaaccaataccacaacccaacctaatgcccttttcggcggtcagactcgccccggtggattcggcaccaccaacacttctaacagcggatctctcttcggaggaggcactcagactactggcaccaccggcggcttcggtactggcggaggattcggttctaccggcaccactggcggcttcggctcaaatgccggcgcagcccctgcgggtggaagccttttcggtggcgccaaacccacgggctttggctcttcgactacgggcactggcggattcggcaccagcggtggcttcggatctgccgctgccacaacaacccccagcacaggctttggtggctcgggtactgccttccagggagctctgcctaactgcgaaggtactggcggcaccccgttcagtccctggaatgagaaggataccagctctgccaacaccacgaaccactatcaaagcatctgttttatgcaaccctacaataaatggtctttcgaggagctgcgtctagcggattaccaacaaggccgtcgcttcggcaacggcagtggtcaagccggtggttttggcgctcctgctttcggcaacactgcaactggtggattcggtcagaatactacaactactcctgccttcggcgctaacgccgctccgttcggagcggctgccacaagtgcgccaaccggcttcggttcaacccagaccgcaggtggtttcggctccactcctgctaacccattgttcggtggagcagccaaaccagcaacttccttattcggcggtggaactactcctgcagcttcatcgggatctctctttggtggaggcacacaaaccgctggtggatttggaagcaacaccggtactggaactggatcagccttcggcaacaccggcgggtctttgttcggtggcagcaaccagcaacagcagaacaagcccgcatttggtgccaccggtacaactggcggtagcgccttcggtggtttcggtaatactcaaaccactaccgccgcaaatccgttcggagcttcgaccgccacagcctcaccctttggtggcggtactcagcagcaaacaccaagtgccttcggtggtttcggtgcaaaccaacagaaccaagctcaaactcaacccaagtcattgtttggcggcggtggatttggtgccggcacccagcaacagggaactggcacaggtttgctcggcggcgccgccagcactactccagctgccggatcttcgctcttcggtggagcccagcagcaaccccagcagcagcagggtagctcactcttcggtggtcaaaatcagcaagctggtaccggcagttcgctatttggcgcttcacagaatcaacaacaacaaaagcccggtggtctcttcggatctaccccagctcccgccgcaggtggtttctctggcttcggtgcctcacagccccagccagccgccggcggtggcggcttgttcggcacacagaaccaacagcagcagaagcccggtggcctcttcggttcgactacgggaaccggcggtggcggcttgtttggcggtggtcaaactaccactggccaaggcgccggctcttcgctcttcggtggtcaacaacaacagcagaccggtggcctgggtgccagtcctttcggcgccacaactaccggacaacaatctcagcctgctcctggtagcttccaagcgtcgctccttgatggaaacccctacggcagccagtccatcttctctggtcttcctgcccctggtgcatcggctcccggcccccttgctacgccactgtcttctagcatgaagcaaaagcagcgaactccgttgcccgtctacagaattacccccaacgctgccaatcgcctcattacccctccgaagcgtggatatggtttctcttactctacctatggctcgccctctggcagcactggtaccccatctggtcttggtagtagtttgttgggtggtgctgccggcagtaacagtctccgcggcagcgttaatggcagcattggccgtaccttcagcaagagttattccactagcaaccttcgcaagaccttcgatccggaggcggacagcatcctttctcctggggccctgcaggccggcagcacacgtggcaccagcaacctcaagcgtctcactatcaaccgtggtctgagaaatgaaattttgtcaccctctactcgcgcttccccggcccctctcctcaccgacggagaagatgctgctcagtctgccgataagctgaagaaaaaggtcagcttcgactctaatacctccgggctcaacggtggagaccttgttcgcgttgaacctaacagtcctgagccgtctgctgaggagcttggcttccttcgctctgtgcgcaagagcggcagcctcaatggtttcgatgctgctggcacttccgatcgtcctgaggcggagtctacccgtcgtgaccttgctgttgtccccgaaagcgcaccaccgaccactaacggtgccaccgttaagcgccttacgttcatccccggcggtgacccaaggcctggtgagtattggatgcaaccttcccgtgctgaacttagccgattgagccgcgaccagctcaaacaagtcgtcgacttcactgttggacgtcagaactgtggatctgtcactttcaacggccctgttgatctgactaccgttgatctggacaaccttttcaccaatattgtggatatcggtcttcgcaagattactgtctaccccgaagaatcggtcaagcctgctaggggcaagggactgaacgtgccgtctaccctgcggattgagaactcctggcctcgtggtagagataagaagagcaactcgcctgtcaccagtggtcctctgttcgacaagcacattgaccgtctacagaaggttggcgatactgagttcgttaattacgagactgagactggaacctgggttttcaaggtgcctcatttcaccacttatggccttgattatgacgaagaggaaggtgagagtcttgatcagagcaccatgagtgcccaaggccctgaccaccctaccccccgggctcacttcgacaaccccgcgagtttcgatcaatccaccactttctccatcgacgagtcctttgttggttctatgattggtgttgaagacgatactttcgatttcaaaaaacgcaagcttgttcctggctctttcgctaatcagaccatgcctgcggaagatgattacttttctgagggtgaaaccgagtcttttttagaggaaggctccacgggttcgactactgagaatgacgacgacgtcgtcaccgagagccaacagtctggcgattcggtagttggatcagatgaggcagatgaaatggatatggcgggtgcctttccgactcctcatcgtaccgtggagcgggacgactaccagagcaccaacggtgatctggacaccacttacccaatctcgaaacacttcggcagccctgcaaagcctcagcttgatcttagtggcgactgggccgagcagttgcagcgcaccatcagtcctcgcaagcagaaccgtgacgccctgcgtgaaatgcaggcgaacgctttcattgatcgcaacctcgtgaacgacgaatctcccacaaccattgcgacagcccctccgaagaaaggtttctcgaacagcattgatcttatgaactctttgtttcagcagccgcgcaagcaagctgccccttctccgctgaagccttctaaggcacagccaaagggctttgaggttagaactcccttcttatgttcacactgattatcatttcctttgttcttttcccttgtgtcgctgcatcatgtatctaggaaattgcacatcatccctcagatagtttaacaaatgtgataacctgagctaaaatctttttcttccttacagtggccttacaacaagcaacccaagacctttgctggcgatacaacacaaatgagcgaatccgatgccgctttccatgactctttcaaacctcgctggggtcccatggactcccttgtctgtgcgaaaaatgatatggaggacacaatcttgggggtgaaccagacctggaaagaaactttctccattttcagcgaggagcgtgatattgctgtgatggcttacaatcaatctggcgaggtatgtttaagcggcttcattggtgtttagttggactttatactcatcatgatacatacagggcaaggaaatgctcgatgtccagcggcttcaatcgtctattcagcgtattgacggcactcctttggttcgtatggccaaggtcgacctgtcacagttccctctatctccgtctacccgttcccagtcggaggaagagcgcttggtgtggcagcttctcaacattctctttaatgatgatattgaggacgacatctcagcaggtgtacctccgcgtctacggcagcaatttgcgcaccggatcaagaaggaccgactcacacgtctttgggagggaatcatccgtgaaaagcactcgcaagacctggatctgattcgctcccccgtggaacgcgccgttcatttgatttgttcacaccgagtggaggaagcttgtaagacactgatcgacagtcaaaatccccatctggcgactatagtcgcacagattggccgcgatgctacctcaagggcagacatagccaaccagatcgatgtatggcgtcagaacaatattctttcggagatgagtgaacccacgcgagccctttatgaactggtcgctggaaatgctctccgcagcgagggcaaattgggcggtgcgcttgaagaccgggcctctagctttggcttcactgagcggtttgatctagattggttccaggcctttggtcttcgtttgtggtactgcactgctgaagatgagccaattgaggtggctgtctcaaagttccttgcggacttggccaccggacaagaacccgccttcccccacccatcccaccaggccagtacacgtgcagttctgcagcctggctctgatacccttgggcgcgaatctcctctttgggttctcctcaaggcgttctcggcgatgcgaggccacggcgcccaatctgtcgacttcccggcctctctcctccccgaatcggtctccggtgaccgtctctccaaccgactctccttccagctacaccacgttcttgctgcgacggtcggacaaaaccaggccatcaaaatcgaccaacatcaaacggacaagcttgtctgggatttcgcttctgaactcagtgcaggtggaaaacttgatcaagcactgtttgtcctcctgcacctttcccaagccaacgaccgcaagcgcgccgtccaagaaactctcgctcggttcgccgctcaactccccgagcccttcgctgccgacggctcctcccacccggcatggcaatatctcctcactgagctccagcttcccgaggcctggatctgggttgccaaggccctgcatgctcgcgacatcggcgatgccgcccgggaagtcgactgtcttattcgcggcaagcattggaatgacgcccacgccacattttgccgcatcgtcggtccaagcaccatcatcgagggcgactaccgtaccctggaagccctggtctctggcttcggcgacggtcccgagcgcaaaatgcgcggctggtcttctggcggtggtgtctacgaagatttcctccgcctggtcaatgcccccagcggccgacgtgatccaattcgcctgaaccgcctggttaacgctcttgttgcaatgggcgatcgtgtccggggatccagtttggaaggactggaggagcgtgttgcgttcaaggagatgagccgggctgttgccggctggattacgcacgaggatgttcatgttagtttcctccccttttccgttgatgtatcttttttgttcattgctgacttctatctttgtacagtctgttgagtcctccgctgttctgggcctacccttgacaggtgatgctcgcgttctgcagactgcagaaatgagccgtcggtattacggcgtcatcatggcgggtggctactaagtttcgagttaaggaaatcattcaatttgcatatgttcgttgtgaaattagcgggcactaattagcccaagcaccttgatcttttcttttgttttgctcttttttctcttgttctgtaccccaaatgatctcaaatggttcccatgacccgtgtactcttaccctattactgaaaaactactatttgaaccaagtcattttatcctttttctgttgtagacatcctagcagaatgaatatataattcgtgatcatacatacccttgttgtcacttacggttcccttcacttattagttgcaaccctaagtatgagtgaagatgaagccaagtgtgctccgctgtatgctttctaagatgatatcggccgtggtatagtataggcacccgaggcatataatcagtaaaatagaggtcgatcacttaggtcttgaggatagaccacaatgccctcaggtctgaccagcaactgagtttcagcgccatgcatattgaagagattagtataaatcacagcaaattcatctgacaagatacccgagaagatgccagatgtcgaataccaaagaagacataatcatttgagatatcactaagctagttcacgaaaaagtacatacaaccaaccgtactgccctccccctatgataccgacgatgataatgcgtcagatgggctgcatttctcgtccatacccgtctacctgtgattgtcgtacggaaaatcgtcttctcgtatgtgctcaaagtgtcacacatacccgtggacaggtcaaactctccatacattgtgttgttgagccaggacgggtcgaatggtcagattgtgcttgcttcgtgtagtgtttccatcaatactggaggtaggtagcctttggtgaggaacagagttggtatagaccattggaggctccagttccgatcatttgcttcgcgatgtgatgtctcctggtttaggcttgccgtcaagggctactatcggcagaccgtcttccttgatctatgagctcgaagtcgatgaaatatgacgtcgagtgggatgtccacgttgtcaacagtgcaagaaccgtacagtctggtgatgcaattctgataatagacttatggaatattgcttcgttgctattggtgaaggaagccgacttgaatttcttattgggtaatgcacctggggctaagtgtgtgtcaattagcacgtccgtcaatgttatagattgtccttggacgccgtactcacttccgtctcacttgaaatctgcgaaccgcatatgggctgggcctttagggcttgtctcatggagcaaaaagactgttggaattgactctgcacgtcaggctcgacgattttcacagcttccttctgattatcgcgtggtctttgtgtaggctcaatagcctgttggttccagatatgagataccatcgatcctaaacccaggcttgtgtagagcactggattgtatgtggtatctccttacagaggagaagtgtgttgtgcgaagtcgaagtgtccggggttgtacaatttagggaaggtgccatttcggaaagagctatgctttggtcctttgctactttgctgcttctctcctctgcttctctcctctctccatctgctatttatcttatccttgctataccttattcatcatggagctgcaaccgcttgatggaactcgtgagggaaacaccgtaacagtacctggtcccttcgagggcaccccggcggataccaatctaagcagagtcgacagtggatatggcgttggctccactgaaattcccactccagcatcggccacagaggcatcccacagcgatgccaacaaggttcataatcagctcgaagctactgctgagggtgcctcaggtgtgctaactaccgagccacatgtctcaaccacagaaacaacaccggatgattcaccggacgattcccagccatcgttttcagcattcagcaaatacgaaaagttattcatcgtggtaatggtgactcttgcttcgttcttctcccctctttccggtcaaatctactaccccgtcatgccaacattggtacggaactaccatctcacccccgagctgatcaacctcacagtcacaacatacatgatcttccaaggcctggctcccagcttcatgggcacattcgccgacaccggcggcagacgtccagcgtatatcattgcgtttgcagtatacaccgctgccaacatcggcctggctttgcagaacagtttcgcggcattgcttatcctccgctgtctccagagcgcagggagcagcggtaccgtggcatttgggtacggcgttatagcggacattgcgacaaccgcagaacgtgggaagtatatcggccccatggcggcaggtgtcatggttgcgcccgcgctgggccctgttatcggtggtctcttggccaaattcctcggctggcgcagtgttttttggttcctggtcattgtcagtggagggtacttggtgttctatgtgcttgctatgccagagacggcgcgcaagattgttggcaacggtcattcagtgccaaaagagtggtggcgcagatcggtcatccaatggtggtcgaagaggcaggcacagtctgacgaggaagggcaaactggtgcagaaggatcccaacaacagtcctcgcataataagcgacttagattcccgaatcctctcaagtcttttgtcattctgctggagtgggatgccttgatcatcatctcatacgtcgggatcgtgatgttcgcgaatatcgctctgttgacaagcactcccagtctcttcggacccctgtacggattcaacgagctccagattggtctctgtttcctgtaagtttatatctcgccctctttatctttttaacccaagggttcattgactaacaaaaactcccagacccctcggagtaagctcttgcctcggtgcagttctatatgggaaagtcattgactacaactacaagcgaacagcccagaggctcgggttcccggtagaccggaagaaaggagacaacttgcgcagttttccaatcgagcgcactcgcctgcaaacagtattcccaacaatggccgttggcgtagcagcattcatcccatatggctgggtcctgcagcaaaaagtacatttagctgcaccgctgatgctgcagttcatcataggcttttgcttcgttgcatccctgaactgcctgaacactcttctggtcgacttattcccagatagacctgccacggctgcgtcggcatgcaaccttgttcgctgctgtcttggtgctgttggggctgctgtcattagccagatgttgagtggcatgggctggggatggtgctttgtttttctggggttggtcatggccgttgggatgggattgctctggattgagaatgtgtatgggatgggctggagagagaagaggttcctccagatcgaacggaagaaggccgagaaggaggctagagccgctgagattcgggtccaggggaaggctgataggagaaaacagaaggatactaatgttcgggaattggctgctggtgctgatgctagtgtcactgaaggaactgatactcgctcaacccagtgaagaaagggatcatcgccctgctatttttagggcggtagactttgttgttactgcattccatcgcttattattatgaggatattattagtcgcgtgacggaaatggaaaaaatgggaatatgctacatagcacgaatgaagacatcaaatgcatcaaatttgctaccgactgtacaataaagggaaacctgggcgcgatagatgaacacgaggggatcgagcagagtaaagaaaagagaaacaccactctccctggccggaccagacagcaagaaacaagaaaagacattaccggccagggagagggagatataagagaggtctagatgtaagaatcatccccgacccattcctgcttctttttgaggggacaacaaatggagaaaaagggttgtaatggaaaaggaaaggtgggaagtgcgtttacatgccaggggagatcagcttgccctcagcacggctgttggggtgccagccaccggcgaagggggcagcgccaagctccttctcgtactggcggatacgggcctccagctcgggacggaagtggcggatcagaccctggatgggccaggcgaaggcctcacccagagcgcagatagtgtggccctcgacctgcttggtgagctcctggagcatgtcgatttcgcgctcgcgggcgttgccggtctcgagacgctgcatcatctgcatagtccatttgctgccctcacggcagggagtgcactggccgcaagactcgtgcttgtagaaggtggacaggcgggagatggcgcggacgatatctgtagacttgtccatgacgatgacggcagcggtacccagaccggtctgggagtccttgagggcgtcgaagtccatcagctggttgtcggccacggtcttggggatgacgggggtcgaggagccaccgggaataacggcgagcaggttgtcccaaccaccgcggacacctccacagtgcttctcgatcagctcgcgcagcgagatggacatctcctcctctactgtgacggggttgttgacgtgaccggagatacagaaaagcttggtaccggcgttacgctcacgaccgaaggaagagaaccagctggcaccacggcgcatgatggtcggtgtcacagcaacggtctcgacgttggtgactgtgctggggcaaccgaacagaccgacggcggcggggaagggaggcttgaggcggggcttgccggccttaccctcaatggactcaatgagcgaggtctcctcaccacaaatgtaggcgcccattccacggtgaatgtacacgtcgaagtcgtatccggaaccgcaggcgttcttgccgatcaggccagcctcgtaggcctcgttgatagcccgctggaggacagtagcttcgtggtagaactcaccacggatgtagatgtaggcagcgttggcgttcatagcacgacccaccaccaagcaaccctcgatcagcttctgggggtccttgcgcatgatctctcggtccttgcaagtaccgggctcaccctcgtctgcgttgacaaccagataacgggggcgagggtccttgtcccaatccttgaagttcatgaaagactgttgagtagcgggtcagcccggttatcccaaaacactcgcgttcgtccgaagtaggccacttacgtatttcaatcctgaggggaatccagcaccaccacgaccacggaggccggatgccttgatttccgagatgagctgctcaaggcattagcaattggtaattccctagcccgtcaattgtgcgactacccacccaatcatcgcccttcgaaataatatccttggtccggtaccagtcaccgtatttcattgatgacttcaaatcagctccgtggtgtccgtaaaggttggtgaagatccgatcttggtccttaagtccgccatagtgcttcacgggaggcgcctccgacacagatgcgaaggagcgggcggccgccccctgggcgcggagggagcgggtcgagaggtgggagagggaggaggtggagggagccgccgctctggatatcatgatgacggcgggggtgacaatgcgtagtgagggtcaaagggtcgtggagaaggagggaagggagtcgtggagctcacggcaattcctgcgcttgctgaatgatccgcctttgggctcgatatgattgggtggtggccttgcacgtgactaagttgctgagtcagtaatccagatttggtcatgacgacctcaagtatgctatatcacgtgactagtatacagctcctttccctaacatggattcgaatctttctagggcaaatacggatggttttctctcttaccctctttttctcatgttattttcatcatcaagtcaatagggctaagatgacgaacggacacgaagcaagcagcctaaaaacagtgcacatctctttcatttctatgtctactgtttcctcttcatttacacttgtggtacatagagacatgcctgctttagcatagacatagatccctccatcttgagtatctcaaatggctcgagagggatcatcaccatttctgagcctgccactgtccatgcccattgaagccactgtgagtccaaccaaccactaccctctgtgagccaattaactccatcgccggatgcaaatgagcttggattttcggccatagcatatgcttggaattgacgaagagtttcgctgggttcatccatgccaatctcaatagacctggaagtgtcagaaggcagagagtattgctcaagcaggaaagtaaaccatcggttgagacgcgacgacaatcttgaacgtgcctcaggcgaattatatgtggcaaccagtaagcaaacaaccattgcaaacagagtttgtggatcggtggatatactcgggacggcctggctcgcctctccgagggcgtgctggaagcatctctgagctggctcctgcatttcagccggcagaaggctgaaaagctcgcctaatctgaacagctcaccatttttactgatgagtgatggacgctccaggatacgcactcggatccgggacatgatctcgtctgagagaagcccggccgggacgcgtgccattagttcatgtaagaggaccttggtatcctcccaactctcaccgcgcttgtgttctctgccgcgtgtgatggtccaagtagcgataaccaaggcagcttgatctaatgctatctgtccattgcggtagatctgggagtgggtctggttcagggtagttggttgcaaaggcagatgctccgcactggctttcaggtttgtggcatgagccattagctcaaagctgatctgagcaagggcggcatagatgctatggctgtttccatatcccggggcaatgcgaatacagccctccgtgatctcgagcattttgcgctcgcgtctgtttgattccatgaccgtcaatgcgtcgaacaatgccggtgagaagatcgagttctccatccttgtttcgggagccaatagtgggtaaaaaggattgaagatgtaatagtggtcctcggtgttcttggcaacctgagggaacagttctagctggcgagccttcgcttcgccgagcgggctgtccggcttcacacccagaagaacaatgcgataatcggttgggttgccggcaatgcaaaatccgtagtttatcaacactatgtttaagtcagtttctggggatccagacattcaaaaagcttgaatatcgcggcatggcaaacgggaaacgtacattgttcattattacgagggccgtaattgttggaaatttcttggcctgcggagtgatcttcaagtacaaggaggccaatatcttcatcgcccgctcgccactcgacctttgccattggtcgatggttgggaaggtcaatgagcggaagcagggccgagactccatcctctggaagatcatcaggctggacagccccagatagaacctttgccgagaatgctcgggaggtaatgatagttgaagcccagagatacagctccctgcatacgaatcagcataatgtttctccgggctgaataacagtgacagttaatagccgtatcccatactcaccacgtatactgttcacagtcggggaatccaatttcatccagcttaagatatcccaaatcatacttctgctcccataccttaatcctctcgacggcagcctcaggaatgccagtaccctgaatccaatctacatcctcctcaccaaagaacaacggggtggtcaactgacccggctgaggcagggtacgaagatacggataccagaatccctcagatccccgtagatactggcccatgaggaagaaggcaaaagtctcctccggcccaacctcgtcgatccatgtccgcgggaggtcaacaccgtgtttagcaaatgagccccgcggagactcatagccaatggaattgaaccaagacattgacactttgattggagtgttgatcacccgggtctctttcgggatggattctggccagtcttctttcacctgcaagtgcacgccgcgcgaggcgtcttgtgcaatgcgcacgctcttgtcgaccgtgccgccatgctgggtgaaccagtttactagctctgtgtgggcttttagccttggatcaacttctctgttttgcccgtgttagatatgtttcatattcttggtttgcaaataactcttgagaatgacgtagctcgaggccgcacttactctgaagaagctgccattcttgaagcgagtagattctatttgatctttattctttttttttcgcacaggtaggactgtttgccactgacgctgctatccaagaatgaactgtggatgtatcggtcaaggtcctgaggaaagaattgatgcgggatggtgggggcccgcttttttcttcgagcttcaatatttcacacctctaagaacgatcatgaaataatacacccagtccagaggtctggtctaccaggatttgctactaattgctcaaactaaaccaatgcgcttctccagacttcaactatcgtacacaggcgaatgcctcaaaagccacggactcgtaagccgatcccagccaggtagcatgcgaatacatgcaaggagacaaattaaacatcagatcagaaaagctctccatgcataacttgaggatcataaatgcaaaaccccatggctactccatcgatggaaggtgtatatacaaaccccatgccacgacgacgactcgcctagaaacccccaccgtttctccaggcagaatgtaccgtcatggccacgcaatcaaatgcaaagagtctaagtttagttcgatgtcgaggacttgcggccaggaaccacgatttccaccaacccgtcatcctcgccatcactgctgtcgttttgctcgtcgtcataatgggagctcacggctcgggatcggcggaagttgctgtatcgggcaggacccgaaaggttggagtaaccaagagattcatttatgatagcctcgtcttcttcatcgtcggagtccatcatgtcgatgccactcggtccgaccatctcgcccatctcatcgtcgtcatcatcctcgacttcgaggggcacacgaacctggcgcctcacggactctgcgtggccatcaccttcatcttcggatgagttggtcgacagcgagtctggagggctgaatcccgattctgggaaggtaggtgaatgtttggcattggctgaaccgaagtcactgttagggaacgcagaactgccaccctcggcatcatcatcgacccctgcaattacgaatgggttgctcggccagtctgactctcggtcctcacttcctccggcccctctgccatccgcgtcgccctctgatggttgttgcttttgggcggcgagacgcgcggctaattgacggcgtgctcgggatggaccgaggctcaatggagcaggtggtgggggtaatatgggaataggttgactggctgagcttgtcaacacctattagaaagccgtgttagcaaagacacaatacatctgacagcccacggcctgtgaaaagggggagaagggataagtgcataagaaacccagtgcagaacaagtggcatagcataggggaggttctctgggctggaagttgcaaggcgacggcgatgaacatcagccaacaggcataataccagttttggtcagtccacagagattacataatagaggaagggggcagtggatgtaaaacacaagggcagacaaaagatttcaaatatgcgcaggaagtgggtggctccattgaacaagcgctagcgatccagcaactctacctaggagtatggctcgttgcgtctcgctatagcttttgatacatggaagggtattaagataaaaatatgggaaaagaaatggagaagaaagtgggggaaagataatgggggatgcacggagtcggttaagaattgtgcaccataatgtcaatagggaagaggccacccacattgtcagtgtcgccttgatcggcattgccagagtctctgtcgtcctgatcctccatttcttcgtcctcgtcatcgcttgagctggcaaagccactcagaagggaggtgccacctccaccatacgctccaccagaaacacttccttggccgaggtcgaagctctggaaggttgaaccgccgattcccccattcaaccctgcgtccgccagagcattggagttagaaaagccttggccggaggtggtgttgttaaggctagtctggcgagacccaactgacatatcaggacgaacaccgccgagaatggcattgtcccgctcacgagtctctgacaaagtctgttctacgtactcaatccaatcaggattcaacacgctctccataactgaccgtgaaagcaactctggcggatgacgctcgctgaacttgacaacttcctccgcaacaagagtaagatgccccatatatccgaggcggatttgcttggtccgctgggtctcatcgctgcgcttttgtccttcaacaatcgcggtagtgatccggccggtgtcaaatacattgactgcgagtgcccgattgtagccacgctccatgggcccattaaagacttgttgaatcacatcgtacacaacattgtgaaggaagttattccatgggaaacggaagaagaagccctatcaatggttagcgtaggtgttcagcgtttttcaaaaaagaaatacaaaccaggatcgttgggaccactttgttctccacgaattgaatcttcaagtaatcaccgaccacgggtcgcccatcagtatcgagttggatgtattgttcggccgaatcctcatcgcctccatcattcaaaatgctggtttcctcagcctgtgcagtaacactagatgcttcttccgattgatcggcaggggcggggtttgactccgatgcttggtcctttgagaagagaggagctggaacaacttgagagagagaagacacgggttcctggctgtcctttcctggatcttcctgctcgccttgtggctgttccttttcaagattcatgccgccaatttggtcagggagaccgatagtaggcgacgatgggtcaatgggtgcaacagaacttccagatggatctgtggtttcttcagaagatgctggctctgttgccgtaatttccggtgggggtatttcgttggccgtctctgttgactgcgagttcgcagtagttgttgtgtcggcaccaacttttgcgcccactatatcaccagatgcaccaacatcctcaaacccttcttcttcgcccacgcgtggcacttctgtggtcttgatatcctctggcgatccagaaccgaaggctgaatcgtttgcgaaatcggccgtggtatcattacaatcgattccggaatgttcgtcttggtgcgaattgaaacccccttcacggatcaaccgctcacgctcctcgtctctctgcttaacgtactcatcactgcctgtttcattcagaaggcccatattactgcaatgaagaagctctgccatcaattcacacgtcttgaatcggtcaaaaccgagcggctcaatttgcccaccccatgcggagttcaaatttcctcgctcaacagtcttgagcttatttccatcatgaatagtgtgttgggaactttgaatgagagccatgaactggggaatatgtctggcaaagagacgcagcaacgttccaagatagatcgggtcgtaagtgctgagcattgtatcgggtccaccaagggactccggatcatagtcggaattgttcttgcgaattacctcgatgacaatacccacacccacggtcagaggattaccgcccttgagcatagcatcgatgagctgctgtacgcactggttcgagacaagctgacgcgtcaggctgttagggccaatgcatgactgatcattcgggcttgcgtttgcagatatagttatgatcgctttcaggaagtcacctgccgaggtttgaacggatgctgggcgatcgggcgacaagaaagacaggagattgggtatcaaatcctgggatttgagccagtcgactgtaccctggccaccctctgccttctcaaggctgataatcttcaggagaagatccatgaccatcgggttatcaacatgctgcaacaatgccgggacaattccatcgagggtcttgaggaactccagcatctcttcggtctttttatcaagcaaagtctcgtttactttcgtgaagtagcttgcctgcaatgaatcaagtggtggtggtcgtcgcaggaagccccagaagtctcgcaagtatgaagggttggccatcatagattcgagaatggaccaggtctctgatgagagaacctcgcaagcgatgtaggcatgcttcagacgattcttctcaactttgtccaagtcttccgggtcaagaatatccttcagcggatccccttccttctcctcgtctgtgttcgcctgctccgcggaagcggtagcatccttgtccttctccgaagcgtctttcgcgttatcttcatcgttctcttcgccatcattcaccaagctcggtgcagtgacatagtccataagccgtttcaagacatgatcctcgcgcaggtattcaatgagtttcgtattaagctgtttcaattcttgaatgatttcaggctcgtctaggagttcttcaagagtgacatcgggtttgtcgagcagggtatcgatggtagagatattcgcatatcccccgaagcgccaaaacatgatggagtatatagccgagggaaatgattcataaaatggattcgtttcgttcgtctccgagatgtcgtaacggagcagtctatggtacaagggctggtcgaaagatcgggcaggaggttgcgcaacaggccgatacaccggcaagccaagcgtggtgtccacacactgagatcaggtcgcgcaggtcgagtggggtacgctggaccgtcacggccgataaatgacaggagctagagaagtaatcgattgaaaattgaagcgatctagcgctgtatgaaaagagaatatattagcaatcacgtccacacacttacatcaccagcagtcccgatgatgtgtacccgtgaagcaggccgccttcaccgggtaacagacggagttggaggatctagtcagggggctttgtaggatcagaagaccaggcccttgatagagcgtaccttcaatctcgagggaatgacgaagaaagagggaaatctgaacctccctgtgggttttgagaggggaagatgaagaaatggggagtggagttggagagtcaaaatgagcagactcgaggcgcacacacacagagaacaggaatggtgactcaacgcctgtccatcaaggaagcagttgaagagagaagagagaaaggttccgcttcggaggaagctgtgctgatcgattaccgatccctgatggccacgagccctgtagaagcaggggcggaaacacgtatgtaatcaccgcggggataaaagcctccagataagaatgaactacaagacccttaaatatatgggactttgagaagaattacatgcttattatgttcttattttgtttaatcttagttatttattttgttgcttttaaattttcatctcatctcatcatggggtcagctgcattgaaaggacggtgggtactaggtacgatcgttccccgccagatttgtgtgctacatgaagtatcgaatactttcagtgtcctgtcccacgtcgtagcccaagttaaccgccacggggaatacaaggatctagattccagcggataggacattatttgacgatttcgcttcacgactttcgcgaaattccatagcaaacacctcctcactaaggtgaaactgggctaaaacttggtataaaaatcatgagaactgaaactttgaatgtacttgaagatcacgtggatattgtggcctcaggcgtcacatattgctagtactcgtaggtggttctggtctccttcgcagaatcatttatattgtttcgaagaaccgctgcacaagtcgtgtgcatggacaggtgagcgggaaaaagtgacatagctaaaacaacccgcccttcaacgcctataaacgcatacataatgatccatatcgacattcttgtacggagtaggagtaggctgcggcgatgtccgttcatgcgcacatttatgtgtgcaacaaaattcagatatcaattggtcttgttcagtcattacctgggaaaataatccatctgcaattagtccaggaagccaatcaagcgatgcttcgctaagtccatatagaaaggctcataccaaaggctctagctaccgatgtaggccaacgattggagaatggttgccacattggagcaatctattgagatgagcatacgatacactctagctcacataaagggccagcttgatatggtaacgtggcaatagtgatcaatattccagcatttctcgttttcttatatatggcgtttgaaagccacttagctaaatatatattctggcagtgactaaagtaagaggaagactagcagatcgcttcacagacattttgcgtgcgggtctaattgcagtttttagttggctctccatatgtggtagatatcatacttcattgaatattatcgtttccattgggttgatagaatcgcgaggaccacttcgacattgtagaaaaggctttacatagagaacttggtgaattatccccacaagatgggtacactattactccccttatattttcccttattgcacagacgtccttgccctctagttttaatgctggcattttaccttacgccaagcagaactttgtggacaggaggaatgttataaactgttatacctaggtagctccaatttatcaccttaacgagactgtatgaaattgaattgatcacaagatgcaatagggtcttttttagcaaaagtacatccttcatttttcctctgtgaagcttccaccgtacacgtacacctcgttagcaaagtgagattcagcccctagagggagtcactttcccacttccactgaaagtacgagagaaaggcaagcacagaagaaaacgtattctcacagcgaacatactcttatcaacatcgactaagttgcgttgcaaccttccatcgagatgtttccacccctcgagtctgctatacagagtctaccttgcgctgcgatgcccactaacttttgttatattaacaaacagcaacagtaatgttgccaaaaacgccacgcaggattccagtgtctccatcacacgggcacggcgccacccgcgtagcggccgcattgtattgttgttgtagtcgatccttttgtcggtggtcacttcttccttcaccggacgactgattgtgctaaagcaccgggcttttgattgacaacgcaccagcttctgcctatctcaaattgcgactgatatcaccttgcagtaataaatgcatggtcgtcacgcaactactgaggctggcctatcagcttaggtaattttgattggttttattgatgggtaggtttatagatgaccagcctttgtttcagatttcgttcataccatcgtatcttcctgcagatctgcagatcggtcttcgggtaacctttgatgttagtgcaatgctagagatgacctactcttccaagattacaaatgccacatggggctataccgaaggggttaaagctaaaactgattaaactcaatataacttcttaaaccgatagcactgtgggttgcgttaaattaagatttaagacatctaccaaaaggacgcgtacatcgaatataaaatcttactcgccagtccactatgggcactgaactacgcttatataaccaacccctattagcactttatgatgaatcctgttaacaaattataatgaagggagtggtattagaagccacgcagtaaagatatgttcgccgattgtcgttgtataaaacatgaatttagcttttaaccgtgccgtgcctaaacccgaagaggcaactcaggcaagccccggggccccgccttggttgggcctatataggtaataatcccccggtcagcctcaattgtacctatctaagtaataattctccgaacaaactccattagaggtgggccaacatcgagtgtacaagacagaataggttcgtctgcttgaaacgtaagggtggggtgggttcaaagacatcacgaacgatattactttttaaaggatgttctgtggataagattaatcaagaacccggcacatgtcgtaatgggtcaaagtaccgtttcatcttgattccaagggtccatgggtcgagtacaaacgaagtagaaagatcagcgacatggtaaacttataagagaggaacatgcctcgtgtagcattctctacactcaactgtcattcatccactctttctttctttcttccttctttctagctcttgtgctccatcatgttcaccaaactttcgctcttttctctttttgcctcgacgctggccgccgggttgtcctacgacaacattgacaaggccgccactccccgagccaaggagcttctcaagtatgtccagtctcagtacggctcgcactatctctctggtcagcaggaactgtccagcctggaatgggtgaaggagaatgttggctccactccggccatcctgggcaccgacctcatgtattactcgccctctgccgttgcccacggaggcaagagtcagactgttgagcaagccatccaatttgacaaggaaggcggtatcaatgctcttgtctggcactggtacgcccccaactgtttgctcgagaccgaaaaacagccgtggtacaagggtttctacaccgagggaacctgtttcaatctggccaatgcgcttggctaccgcggaaactcgacaggccaccgcggcaacggaacggactaccgtctattgatccgcgatatcgatgctatcgcggctcagctgaagcgtttggctgatgcagacgttccggttctcttccgccctcttcacgagcccgagggtggatggttctggtggggagctcaaggccctgctcccttcaagaagctctggaacatcctctacgaccgcatcacccgcgtgcacaacatccacaacattgtctgggtctgcaacactgccgagtccaagtggtatcctggaaacgacaagtgcgatattgccaccgttgaccactatgccgacgccggtgaccatggtgtcctcgcggataagttccacgctctgcaaaatgtcaccaagggtgaaagagttcttgcgctggccgaggttggtaccatccccgatgctgagctccaggccaaggaaaacattccctgggccttctggatggcctggaacgacgagttcatcaaggatgggaagcacaactcccagcaattcctgaaagagaccttcaacaacgagcgcgtcgttaccatcgaggataagaagaagaactgaagcgggcttgcgccttagccagggaactatagatctatgatctgtggccatgttttgctaagctgtatgattagccggatgtggtttggggttcttctcacttgtattgtgcaaggatactactgagtagttttcttgtatgtccattcctttactgtgtttacacattttactttctattgcgatgcctcatgggagagattacgtgtggcaggcttcataccttacatattctagttagagagatagtttctttatttttaaacctctcatctctctatgtttttgcctgcttcctctcctgggagctaacttggtagatttcatgtccctcctccttctagtcatagtgaatgtagaaagacgctcgtggttttcattctcatatagccttggcctttcttcttttagcatctatccatgtatctcgcattgacagcatatcccgacgtctttcaccacgagcctacccacaggttatgcaccctccatagctcgcttttcgttatctgtaccatccccattcttatttccctgcatatttttgtcctctagtacctacctttttattgacttgtatcaatttatatcgagcccacatccattgagggcctttgtctttctttccatcttcattatgcaggaaggctgggcggccaactatagatggttagagccaaatatgaagaccaaggaaataattcgaaactatattttgtatggctgccatatacatgtaatgagaaacggtgtgcgtacctacactatgaactagacgtgaagtaggagatagggaagcatcggcccgctgtggagagcggagcaaccctaaagcttccaaaaattcacatgataaaaggcaccgccctgtgtggatgaatggatgggcgggcacttggcctagcggttgtcattggcggcatttggcgcattgccccttggatctccgtccatcctcagcttgagtgccgtttgatctcaagttgccggatcgatgacttttttatttattttactttgagaatcttccaataacaacaatgattacaaaatacgtacaacatgagcaccacaagcttaagaagcagcccactagttttgaacaatacccttgttaagtctagtttgtgcttccaggcctaggtccggttggaagcagccctagtggtgtccctccagtgagtatcgtgccatccttacttttccgacaactgatcaagaatatattttcggggtcttgcaatgtcagtaggggttggtattatgaaccagcaattgtccatgtaccagtggcaattcgagcgcaatgttgcctctgtatccttcgctcacttctggcaccattgtgcactgtaggcttctagcgaacttaaccagaaagatggccaaacttgacaagctgcaaatcacctgggcagattctaggcacctcaaaatgacaccagtccaggtgatgcctcacgtgggcaccccaggtccacgagtcctcgagctgttgtaccagggcgtctcggcatctcgggacctcgggaagtcccgaggtcacctgggcacctgggcacctgggcagatcagtaagcttacataacaaagcgtcgtccacgctcagctttactcggggaggcaaaagcggcaagaccgaaggatcaaaacggaaagggacagccaagaagtggccggaaatccggtacctacgtacatacacgcatgcacttgtgtatataagaaacaatcaaggctcgtcttttattctatattttgccagcttttaccggaagtgttctgtcccagctattggtaaattaccatttcggcccaccgatcgcaggtttattgagcactggccacgcctggtctggaatagctcccaagtccgctgcctatttgccctcaccttcacctttcaataataacccttacccaaaccaccatcatgaatcgactattcggcacaaagagtacaggccccaagccgactcttgaaggtgctattaacaatgtacgatgcccgcacaagcctgatccaaggcgcccccgcccctcaagataccccactaaccaaacaacaggtcgacacccgagtttccagcatagatgtgaagctagcagcgctcaactccgaactctccacatatcaaactaagatggcgaagatgcgcgatgggccgggcaagaatgcgctccgacagaaagcgctcaaggtccttcagcgacgaaaacaatacgaggcgcagcgagaccagctctcccaacaatcgtggaacatggagcaggcgggcatgatgcaggataatttgaagaatgtgatgacgacggtggacgcgatgaagaccactaccaaggagctcaagaagcagtatggcaaggtcgacgtggataagatcgagcagatgcaggatgagatggcggatctgatggaggtcgggaatgagatccaagagagtatctctcgggcctatgatgtccctgaggatgttgatgaggccgagttggatgcggagcttgaggcgctgggcgaggaatcaatgtttgagagtagcatgggcgagagtgctatgccgagcttcttacaggatgaggtggctcccccgcagtttattgatgagccgccggaggagcataaggtcaaggaggctgcaggcggacttggataagtctaatgttaaagcgtgcttttgtttagcggcaactatgtgttcttctatgtcaaggcgcaggcagtggagttgattgggtttttattttaacttgcaataagctacgctcatatcattgaagctctcatttcatctttcatcctgctcatattgtagcgattagcatctattataacctccgtagatctgatttcgtatatgcaatcagggacgtgcttcgccattcctctcgtcccagatgtgtgtgttatggaaaggatcaccatctagagattaagatgctttgcccattcccaccagcaccagcagggcgacattcatcacaacgatgataatccacacaaggaccgcaaccacagaagtgagtaagttattccgcatcggaactgtcaccacatgaacttcaccttcttgtccggaagcttcttcggtccgaactgtcatatagcgattgagacaagtgaaccagataagtggcgctgagacaaatggcagaataacgctcaaagcaacctgacttgcagtcaaagtcctgtcaatgccctccttgccaacagccgcagcaatgatgatactgggaatgatactgatcgagcgcgtgatgagtcttcgaagccatggtcgaatgctccagttcagcatcccctcgctcaccatttggcctgcaattgtgcagacgattccagcggagataccagacagtaacagggcaagagcgaatactaagccggcggcaggtgcgatcgacttggagagcaaactgtgaattccaaataggtcggctttgcctccgccaggaacatcatagagagcagcacccgccacaattaggattgcactgttcacaaacagggcgaaggtgaaaagtgacagcgacaactcgatgatggagtacttcatgcagccgcggattgcataaatcgatgggcgatattttacttcgccttcagcattccctaggggtacagaggtctccacgtaaccacagttgacgtcgaattccttgaggcgggattgaaccacgccgctaccaagaaatagggagtgtggcataacggtggcaccgaggattccacagctttggtaaagactgaagatgcgttaatagctgaatattttgcgaaggtgaccaaactgtagattagagacctacccttccgattgaacgatggctgaagatggcagataaccgcggaagacttcaccaactgactggtcctttatgagagagagctgaatgcaaaagcacacaaccacacccaacaccaaagccatgacaaagaactcgaacagccgaagcccccacatcttcccattgggtcggtagaaaatgagaatgaagagaacatctaccaatgtgatagcacaaccagctaccaaggggatattcaacagtaagttcaacgcgatcgctgatccaaccacctttcaaatttgtcagtatttcagtaagagatctctacaccgaaatgcgacactcacctctgcaatatcagttgcgataatggccgcttcagccatgatatagagaagaatcactagccatctcggaagatgctctcggcagttttcagccagattcagaccagtcacagagcccaacttgatgcatagagactgcagaagaatggcaaataagttggaaaggagaacaataaacaacaaggcgtacttgaaatctgcacccgctgcgacatcggtagcgtaatttccggggtcgatataggcaaccgcgataaggaaaccagggccgatgaaacggctgaacttggccaaagttcgagcgcaatgcagagaataagacgtcaaactagtataaaaagggtggcgaggtgatccgctgctccttgggggtgtatcacctcccgagtccgcagcgatcacttcgccacttggcaccttttcctttccggggtcgcgatcttgctgactgtttggtctgacatcgatggataacggatcatctcccgctgcattggcagaattggcatgtctgcgatgaactctggaattggcaaggccattgaaatcattccttgtagtgatgtcggggctgaagggtggtgggctttgattccagctcgggttttcgagtgtgtcgtcagtccgcgaggggcaattcatggctgcaggcttggctcggatgtaggcttggctgtgcttggctctggatgtcaacgagttcaccttcgaattaagccttgagttcttgagaggtaaatattcaggtacctttggatcctgtaagagtccgaaattgcccgatgttcgttattccctctagaacccgcgtataaaccggacttgtctcacattatccttgacccttccccgcttgttatcatccatggattttacattcttactccatacatcttttttttttatgtctggatctgaggcctaattgattgccttggatcttctagatatcacaaaaggatcgaatttcactcggacagtcaacggtcagatacttatatgcacgatctgcataaaacatgatcagaagatcttgagtggcatgtaatacgatgtatttattttcaattgggcctgccggcatcggcacaggtgagttagctcgataataacaaagatgacaattgcaaattatatcctataaaatattccaaatgtagatattgctttttcatatcatcttatattttaaagtagatgtatcgtcaatcaaggatctatccaatatgtatatacaaccagtcggattcaggaatgataggaataacaaggaataacaataacaataacataacaatcaaacaaacaaaaaaaccatgcaaggactatatgcatgcttaaaaataacaaaatgaatggacaataatatgcaatatgacatgtctggctctcataggcactttcactaagtacccaaggctaatcaccaatagaccccccaagttcaccgccaagtccactccgttgcccctcgcaacctctttacccgcacgttgtttactcctccaccttcaatccagccaaccccaaggatcgtctcatacgctaagtcgaggcaagtggatcaacatcttgatcctcgatgacggttgctgttggcagcaagaagccgttgattcttcaaattccccagcttgcccagcttgcccatcttggtcttttcttttccttccaacccgatcttcttccccgcttttttgttctttgttgaaattgaagggatatagtacttgactatcacccttgttgtttgtgaccgcgttgttgttctattctgcgtttgtctgcacagatcccgtgagttcgaactgcaactacccgttcccctccaccatctacttcacctgctaacaagatgtacttagttgctggtcaaagaggatagcgatggctgcgagtacctctggtccccaaatctttgacgatgcgaaccgatcccctaccaaacagtccatgttccgggccataatgtcatccaaaacccataaacgaaatcaatccgccgacgacgcctcggccccgcggcctatgcagagaagccggccaactgagaacatccctttcccattcagcgaggagcctgactccatcgccggctaccgcccgctcagtgagattgtccccaatcgtgatgcgggtgaccaagggatggcgccgaagatgggcagcaaggaaaacaaaggtgccctgcataagaagaccaagagtgccgtctcattgaagtctctgaaaaattatatggagcgaaaggatagtaggtcggaggagacacccgagcaaagtgaggatctgtcgcccaaaaaggccaaatcatccaacagtctctcggccatcctcaaaaggtcccagcggggaagaaaggatggctcaaagcagagccgggataaggaaaaccgcagcccgactgaccttatcgatcatatgccatccccagtttcatccccagtctggtcgcagggctcggcttcggttcataaagagcctactggtcgatcgaggccaaactccaccgccgacatgaggcgaactgtggcggacgaagtctctctctatacacccaagggctacgggccaagccagcaacgcaacttctatgactaccaccaaccctcccttggcaaatcgaatgaccccaagcctcgccccaagtcagacatcatggcaggaaaccgcaaagtgaaggatattctcgggctacagcgcgcatcttcgggagagagcgaccctgttgggcgatctggcagtgcttcttctaagagcagagggccaccgagtccacgaaaaacatccccacctaccatggcaaaggaagagcccaagcgactttcccgtgtacaggctgctatctctgcattcaatgcaaaggagcgagacgctgaagttcatcagcatctcaactccaaggatctagaaagcgagttcgagaagctgctggtttgttgaccatacatcgtacaaacaatttgaatggcaaggctaacctctctcaaggatgcgaggaatattcctcataatatgagagacaagatgcgctcacttgacactaatatcaaggctgattttatccagaaagatcggacggagaacatcactcctctcagcgggggaaccggtgatagtcgtcgaggacgcggcaaagaatccaaggaagacacccaacctcaggatcgcaaaggatctcgatctcgatctaggagccgcggatttaccttcaagggcccctcgtcacctggcaagaagttgcggcgggatagtgaagcatcaagccgtcggccaaggtctgtggacctttcccagcctgttggtgtctacaccaccctctcagccaatgtttcaacggcatcacttgctgatgcggccgctgtcgatacggcagcggatccttccgactttgtgcattacctgagagagatccaaaaacctgagatggttgaggtggggaagatgcacaaactacgtcttctcctacgtaacgaaactgtccaatgggtcaatgactttatcactgaaggaggaatggatgagattgtgcagcttctctaccgtattatgaagatgacctggcggtatgtatcctgtcttctccatccagaccagtaactaacccgtcctacagcgaggaccatgaggacacccttttgcacgaggcattgctctgtctgaaggctctttgcactacatctgctgccctggcacaccttactgctattgagcatgagcttttccccgctctgctgcatatgctctttgacgaggaaaagaagggccccagtgaattcaccactcgagggattgttgcaaacctgctattcacgcagctctccactgctcctgctggtgcagaggcatccaagcgcgccagacagatcctttcttatctgaaggatcccgcgccaccagtggacaatcagccgctggccttcattgccaatatctaccaatcacgaccctatagagtgtggtgtaaggagatcaccaacgtcactaaggaggtcttctggattttccttcatcacctgaatgtgattcccctccccaagtcggaggaccttttcggcgaaaaggtaccagtagacactcgtccctacaacgagcgtcacttcccagtaccccgccctccggttccggccgccccatacgttggaggtgttgaatgggatgcgaccaactaccttgcggcacatctcgatctcgtaaacggcctgattgccatgctgcccacccctgatgagcgaaaccaacttcgtgatgagctccgtgcctctggttttgagaaagtcatgggtggtagtctgcgtacttgcaaggagaagttctattcttctgtgcatgattgcctgcgaacctgggtcgcagcagcagccgatgatggctggccttatacctttgtgcgcgaaggcccaccccgagcaggcgaacccggctcgcccaccaaatcccctaagaagtccgcgccaggtagtcctagaaaaggcctggtcgacgagcggccgcctaggctagagcttgctctagacttctcggacaaccgtccagctgctggtccgactaccccgtcgagcgacctgcgcagctggctttaagaaccgggtgcgcaaccccccggttcgatctaacgaatttcccattcctctcttgtctttatttcctatctttcttttgggtttcacattatcatgactcggcgttagggctgatcctcagccccaccccaacgtattttgttggaatgttttgtttactttggagtttattggtggcctgttatctctgacaggcgttggcattcttggtgttattggcatgttgattgcatttcattgtccaagagaagtcctgcggacatgatgtaacgaagccaaatattggcacaggcgacggagcagaaagcgagaaagagactgttgatattccctgtctctttctccttcactccatggtacagcgacgcctgttcttccgacgggatttcttcatgacaaatgacctatgaacagatatgagaattgaatgaatcgacagttgttttagtgaattttgagattttctggtaggctgcagatgcaagtagggaatctaggtgaatattgtacaaaatattgatatcagacataaatatgactcgactacgagctctcctcaggcgccgcattgtccttctgaacccttcccggtccaggaggcggtgcgctggagaacatggcccgaacaccagcaaagaatttctcccgaatctattagttgaaatcatgttagccaagatatcaacaagcataatccccaagagagagcacttaccacatggaacaccgtatcctccgtctcccactccataaacaacacagagtagacaataacaactatacataaaaagtcagcatccatcctcaaactccatgcacatcatccaccacaagtctatacacaatccgtccccaacaccaacgcaacccatcaatctgaacaaaaactcacatccaataataacccactgtcccagcgtaacagccttcgtaaacttcggccgcgcatatttcagcgccgcacgccgacggtacttgcgctcaagtcggaactggtgtttcggtgacaacttcgacatatccggtggccattgccgctttggctggtaagggctgtaatacacatcttcgaaggagggcggtggggaggagtcgggtttgtttgcggagagacggaatggcgaggggtcttttgttggtggtgatgctttgaaggctgtgaacggggttgtggtgaagaggcgggacgtgctggggttctgttggtgcagttttattgttagtttttgctgggtttttggcttggatgtctcccgaaacgtttggattctgctttgcttggttgggtgtgcgtacaaggtgccatggtggacgggtgagttgtagcttgcaggatgaggcgcttgatggtgtgctgggtgatgcgcgcgctgatgaggcggcggttagggcgcgtcggatcatgggtgtgtgtctgcttcgtttggttgtttggttgttggaggatgatgtatgtggtatattggctggtggttctgctcaggtgggagggaatatggatgaagaccggatgctttccttgtttggtaggtggtcttgcttacaatttctaaatctgcaaattatttcaataattcctctgatagctcagctggaagagcgcaagactgtaattgatctgttcagagaacttgttatcttgaggtccctggttcgatcccgggtcagaggatttttttcatttttggctattcattgacactaactagagtacaatagttaacagttttatatttttactaccgcagatatataacttgaagagtaacggattggacatggatttttgcgtatatgtggttggtatagctcttgagtcgtggagaacatataggtcgccacaccccgtgcaaaatatatacatcaacgcggacgaccggcgttctccaaagctttcgacaaccaatctgaccaatgtccagtccattctgtaccccccagtggatcggaacccggggcacagctcgaattattttgcttctcccccccgaacccggaaggcatgaaactgcgtaaactcgcatgtcagagatactacctaggtacctacatgtgttataccgtccacagagccaaaacaagacagggaatagggataggtatcgactcactagagcccaatgttaaagacatgatagcggatataccactacatgtcaatttgattttagatttaatggggactggcgtcccaccagacacggccccatatccgaggtttcaaactcgcagaggcctgcttctaaggtagaccaatgccattagataccggcgaagggcatggcccattcccctgaagaaaagttgttactttgctggagtaagggcgaggcatggaatgccgtggcaaagccttggggaatatatactttgccacccgagttcctatgagttcaccacggtacgtgaactgtcgctgcattggccatagacccccgatgagacaggcagccatcgaatctccatgtttttatttcaaactcaacaagttctgccagcgagattcatcagacaagtgtacaaagctctggcatggatttcccgccccggacagtcacacccagaagtacttgaatgcagaatttggctgagcgtgctggtggacactatgtcaacgtgagtcgcacaatctgctggaataaggcaagactggtatcagggccgacattaagcctgctgtacacatggccacggggtcgcggttctcagacggtagccatgtcaacatagatgctgccatatgatgtacaggactggacgacaaaagctgcgcgaaactgctgctgagaccctaggtagctatccgagtcagtgcccagaatgggcaagaatagtgtggagggcatgaacaccgagtccaatgataagcagaagctcagcctttgcaatattgcagcttagatcgacgccacatgccgtcgttcactccgaggagtgagatcattgacctgtgggtgcttgtacacagcaacaccggtgccacctgcggacgtcggcgctccaaatcaaactgcgttgagaggggtgctttgccgccgggttatcttgatactcccgtgtcgagcaagtaacgagtccatactgttggaaggatatttttacaagaaatcagtctttcaaggttgtgattcgaagtggacaccgcttggtaggagctacataaacctgtacgtatgtaggtctggtgagattgtttcataatacttaaatgggcaaaacagccaatcaaatcccctgatagctcagctggaagagcgcaagactgtaattgacgtgttctcatggaacttgttatcttgaggtccctggttcgatcccgggtcaggggatcattttttatttctttcccgattttctgcttttgtctttttgaaaggaatatttgaaacaacccggcagtccactctaaaactcttatgttatgctacgtattgcagtggggttgtatacaccgtatttgcattgcaggtgcgcacacgcgacctgcgcattgatgcctcggttcccatactcgcagtcgaatatgtagcccccaatgacatacaagtctctgtcttccctacatatctccatatccctatctagagctcccagtcaccacttgaagtcgagaccaagctgtctcaacatcgcttggaacatccacatgagcaatgaagccacgcccccgaggaccataaccatccttatcatccctcaacctcggtatctcgcccataatcagctccagaaaccgattctgtgaccacaactctgacggtggtaatgtgtctgtatactcaatgactccgttacgggacaattgcacgtgtggcacaaacaccgggcaactaataatcgagaccagagatcgggtgccctcataagccttctcaaacgatgccctggtcctgagcatcattgtgggatcctgaatgataatgcaagtggctggtgctcgaaagcccgcttcatcgaggaccctgcgagagaatgaagcattctgaccgcaattcgtagatcggggttcaagcagaacctgacatccttctttggtgatgagagatcgatcgaaaaactgatcgagaattcgttcgagaaccttggcttcagggagaccttggatctcgtgggcgatctgtgagaagactggatgagacttcactgcattgtaaaggagctcagttgagtgcccaataccgccgcacagtacgagagctttggtaagggatggcttttgctgaagagtcttgaacaggacctcggcactgtggagaacggctgaggcgcatatgacaatgcagtcgactggggatgtggtggagagatcgggcagttgattatcgctgagaaattcagacaagaggttgatatcatcgaccatgtaggaatttgcggccattgcgttggatcaaagtagttcgtcggacgggccaccaccggacaggtaagtaagtctttggtgacacaatgaagtacatgggaaaaataaaaaaatcctctgacccgggatcgaaccagggacctcaagataacaagttctctgaacagatcaattacagtcttgcgctcttccagctgagctatcagaggatgtgatgatggcactttccctttctcgatttatgaagaacttgcaatagtcaaaacactatcgacgtagctgttctaaggccaacttattcgtgggagtggtatcgacattatgttgagataggccctggtgtatgatatttgtgcatatagcacctgaaaacatatgaatttatgaacactcccaatgccgagctgatcttcttacatgacgtcgtaaagacgtccgcatgtgatatacgatttcacatgccccatgatccaccactcggagatcccgtgactgccccggatcaaaaatgatgcggccaaatggacctcggtactttctcagaatgcgacagcggccagctacggccgtccaaaggggaaataccaccgattccacggctctgatttataaaccaccgcttccccagatatttggcctactttcttatcctcacttttgccctgtccttcatcctcatacctctcctatacctccatcacacattgacgtcatgtctaacggtgagtgatgtgcatgtgacagcccatggccatgtattcaacagaacactgggtttctggtggcttttgacgggttagaatcgaaatagaaacagcaaactaattcctatctatagcccagcaacgccttagccaggtttcctcccacttcggccccggtggcaagaagggagccgccgctattaccgaaaagcaccccgatgacattgtcgtgacatgtgccctccgcacagccctcaccaagggtggtaagggtggcttcaaggataccgctggcgctgacctgcttgctggtgtcttcaaggctgttctgaacaagagcggcgttgaccccagctctgtccaggacattgccgtcggctccgtccttgcccccggtggtggtgctactgagttccgtgccgctgctctcgtggctggcttccccgagagcaccgccgtgaagagcttgaaccgtcagtgctctagcggtctccaggctatcgccgatattgccaatgccattcagtctggcatgatcgatgtcggcatcggtgccggtgttgagagcatgtcctctcagtacgggtatgttacaagccccccaaacccccgttcaataatatggctaataacttgatacagacccggtgccgtgaccgagttctccgacctcctcgagagccaccccgagtccgcaaactgcaaggtccccatgggtgtgctgtccgagaacatggccaaagaccgtggcgtgacccgtgcttcccaagactccttcgccgctcaatcataccagaaggctgttgccgcccagaaggccggtctcttcaacgaagagatcgcccctcttgacgtgaagtggaccgaccctaagaccggcgaggagaagaccatcaccgtgaaggccgatgacggcgtccgccagggtatcaccgccgagtcgcttggcaagatcaagcccgcctttgccaaggacggctccatccacgccggtaacgcttcccagatctccgacggtgccgccgccgtcctcctcatgaagcggtccactgcggagcgtctgggccagaagatccttggcaagtatgtcactgccagcgtcgtcggcgtgaagcccctgctcatgggcgtcggcccttggaaggctatccccgttgcgctggagaaggccggcatcaccaaggatgatgtcgacatttatgagatcaacgaggctttcgcttcccagtgtgtctggtgtgttaatgaactcggcatccctgccgagaaggttaaccccaagggtggtgctattgctttcggtcaccctcttggctgcactggtgcccgtcaggtcagcactttgtttactgagctcaagcgcacaaacaagaagattggtgtcaccagcatgtgcgtcggtaccggtatgggtatggccgctgtctgggtgtcggagtaaacgaaacaattgtatatttgcacagcgatttggctttttagcccttcttttctatttcacatgcacagatttctcgttatgtattgaatacttcaaataccaaaagattagaactgcatatatatgtctgtgtacatgcctgctccgtatttggtagcaatattgctgtagactccctgcaggtgatcccgagcctggttcgaggtcttcccagtttcgtcgcccatcatataatcttgttgtatgtatatacatttggctggaagagtaggctatcagcggaatttattaaaagcatcagtgacactcattccctgcgcaacagcctccttggccttgtcatccattgcggtcagtttaggcatcagctcaagcacctgacaaagcagctcacgaggaatggccactactccttccaaggggtcacagaagataatgtctccctataatgcattgcaatgatcagaccctgaacccgaccatgaagcaaaaagcaatcaatcagctaggactcacaggcgagacagtaacacccccgatcgagattggcacatcacgagcaccagccttggcctcggcattagtgccaacagtagaagtagcacgagcccagatctaccatcagccgagaacacgatcagtgacacgaacgaataaaacatgagaaatctgacgaaccggaagcccggtagctttcaattccttcaagtccctgacccgaccacccacaactgtggctttgatcccgagggctttcatcctggtcgccatgatcccgcccgtcacggcacagtactggttctcaggctgctcaatgacgacgatggatccggcgccagaaggatctgacgcttggaattcgccgacatggtctacccagtgcgtacccggcgggaacccgtgcttctgggggttttctgtcgcaattgatggtgggctggcgtttttggctagaaatttgaatgttgttgccggcgccgcaaccctggacattgtttcatttcgccctgttgtgggggaaagtggtactggtggaagtgtgtgagtgggattattgaagatatagatagaggctttggagagatttccaaggttgtattagtggcttacctagatctgcaaggtagcctgctcttgctgtgctgccctcgggcgtcttttgtaacttgatgagggcgtctgatacctgggaattacaatgttagatgtgctttgtggttcgatagtctatgctggcatacatcgcagggtgagaagttctcgactaatgtcgcaagttgctcgtttagtgtagtcattgttcagatgcggggttcacggtgggaagggcagtatgctgttcaaaatgtatagatagtcggactgtacaaagtagaagttagacaagaagtaatagatgaatgtgctgaacccaaaggtccattcgctgatcagtcgaagcacatgtccgtaggtccggatatcggatgaaaatatacaacatacatcatcggagatctataactcggagtgtttcaaggcacatttcacaaggttattgcttagtcttagtttgagatattgtgacactggctataattgaatctatatttactacatttcatgtccaaaattgactattatgcctggaatgtaagactgttcctcacacgggtcatagccgaggtgatggataataataatatctcccgcatccataactcgcacagcttgcagggaacgtggggtataaagagatccttaggacaatatattcttcaaaagcaaagcgaaaatagatccaagattgctcgttagtagtatatatactactactgcaactaccggggctcgtgtcttccattgccgatattctacctaggtatgttttactcgacctatttacccccaccagtttaagccggggcagcatttgcgacgtagcatgctttgtttacttagatttatcataactagatccaacgtagtatgggtagtgctacagatagaaaaagatgggcgcattctgctctataagccatgacaatacggatatgcattttccatcaacagtccaagtctgtctataacagctggatgtatagacggatgttccctaatatagccgaggactataaactgccgtcgcggaagcaaccatgtgcgggaaaatgtggggagcccaatattggtcatcagaatgacaatcacatagagagaatggaataattccgatcctcgatcatcgttgtgaagaaagacaattcatacatccaaacacaaccaaaacaacaaggaaccccgataatggcggaaaaacccacatataccgatcaacaactggagttatacttggaccgtatcgggtactcccactccgatcaatccgagagcaatcttcttcagcatctccgccaacatatcgagaatgacgcactttctgcgctgtctgaactccaaaggcggcatctcgctgccattccatggggcaactcggggctgcattactcgcaacatcatactatctctctgaacccgcagaatctctttgagaagatggtggagcggcggctagatgggtactgcatggagaacacgggcatcttctttattgtcttgcggtccctgggttacctagtttacgccaccggaggtcgagtcagtcatgctgcgtcgaagggactggatgacggattatatttgcccctgtaagtgctccgacagtttatcattccgagcggagctgacattgatctgccaaagtggacatatgattctgattgtggtaattgacggaatgaagtacatggtacggcacgaagatcgactgcagctaccgcatgaaccatactaacggatatggacaggttgatgtcggctttggaaacaattgtgccactgctccactattacttcaagagggtgctactgctacggctatcgcgccatctgagatgcggattgtcagagaaagaattgccgagttcacagacccaaatcaaaagatctggatctaccaaacaagatacaacccggagagcaagtggttggaccaggtctgcttttccgacgtggagttcctaccccaggatttcggcgtcatgaacttctccgtcagccagagccgaaccagctggtttacccagttctttgtctgcatacgaatgattttggaccaaagtggcacagaaataattggccagtgcgttatgtcgggcaaagaagtcaaggagagattgcgcgggcaaacggagatcttgcaagtgctgcagactgaagaggaccgcgtcagggcactggccaagtatttcgatatgcaccttcgtgagtctgagatccaagggattcggggcatgacctcggagctcaagtagacatgacggagcggactactaaggaaacccgggagaataattgatatggtacaacgtttctagagaaattgcagtggatatgtatgatcacggagtaacgaaggcgcagacattgaacgtaaaggaaaagaggttgcaatttttgaaactagtagatccggttctcgatctatgtctcgggtcagcgtttctgcctggggcctggaatccaaggaacacagaatctgttattcgtaccttccatgggttgctgacttcgaatccggtgggcgcttggtggttgctggactgcccccggaatgagcctgtgatgcgctgatctctctccatcactatggttggttgtggttagtctcatgcataattcttctcaggcgcttttggtcggccgataagcttgtaagcactcactttgctgtaaaattgttagccaatgtgctttatgcaagttccgaccgcagccgacaaggatggaaaccaacttactctatcccacaggtcgcggttccagcgcgccttcttgccatcgttggcaaagcgtttgacgtagtgaaggccgtagccagacacaccaaacatctgtagcaattggtgagctaaagtcacggaaggcattgtccaatggcacgtacggtgatgataatcccatagggaagcagggcctcaaaagggacacccatggcgtgcggttgtatgggtatgtagatgatcggaaaaaggtgtcaaattagaatcaagagccgtcaagcctcttgcggactgaggggagtagataggtcgcggagagtgtggaggggagtgtctcttcctacagcgacgggcttgaggtctcctccacccaaagtggtttagcgtatgatgactcagcgcgctgcaacgacactcacaggacaaggggcgtgaaggccgctgcagatcgcattcgattgtaaaagagacaggccccggtgtatggactgtctgtcgacgcgtctggtacgcttttgaatcaaagattgcactggtttctcttggggtgagtttcctctgttttgcgacgcgcttgcgatgcctggccactccagcggcggactgacacctcttgtttgtttagctcccactttgcgcctggagactttgagcgtcaatatcgaccgatacttgttttcgtaaatatcttcggtgccactccaactagcctcgaacccgcttttgatccagatgcgctcccggatcagcgccgacgtcagcggggtgcttctgtaaccggatcggtttaagctttctttcacgaaaaagatacctcagtcaacctgagcgcataaaacaagcactgctgtgctcaacctggcggtggcggtaactttcactatggcggcgacggcgccgccagcaaacgatgaatcgggcaaactcgacccgcctgtggacccagcggatagcgacctagatgcggagggcgaggaagaaaccgacttgtatgaaatggatcaacggcttcaagatgcagttcaccgagcatacactggagaagttgatgaggatggcccggaagaagctgtggatggaaacaacctaagcgtcaatgggttgaacggagaagacgatgatgacaacgatgaggccgaaccagttggagctgttaaactacctgacgatgacgcgggttctgaagaagactatgcggagtctgagacagccgacgcggatgccgatcccgggtttgaggcaaatgaccgtgacgcttcagaacccgaatcaagtgaccacgagtcagaagccgaagactgggaagctgagagcaatgagcgcgaggatgtcgagactgatattcgtagtagctcaaattgcttgtaagtagaggggctcgatgcagcgctcggtgcagaatgaggaagtttaggtgctaacaacggacaaacagggtttgcagtcaagacgaggaacacgacccaagcgaagatttcgaggaatggctcacttgtgttgtgtgtggtgatcactgtccgtttgccttttaccccgattatggtagaccatcgctgactcgataccccacagctcatcggcaatgcgctcgcgaacaagacgcatttgatgaaacggaaggtacgcaaacacatggtcattgactgttattttatcgcctcttatctctttaatgaattacgcgctctgacatcgcaacacgcaggcccatggagatgccccagctgtgttaataacaatctagagcccgacacgataacaaattcagcgacagaaaccggactcggagccccagccctccccaaagagcttctacctgcgcacgctggcacacacgacgagggattccattctatctttaacacaggcgttgacgacgagatgctcaatagctcgcggtcgctacgcaagcgaaaggcctcgtcaatcgaggccgaagaacacacaccggtgcttcgcaaaagacttcgacaaacatctttccgctccgatcgccccatattgaatgatgcggccttggagggcggggatgtcaatgctgatggcgatgcccactcccctgctcggacacgttctgtacgcgtgcgacgcactcgcgcagtggaccgagagcactgccgcgtggtagctagacagtacgggaaattgatcattgggttccggctggaagaggcaaaaatgtctaaaataacaggctctcaaattcgatcgcaacgcaagaagaagaaagcaccaaagccgccacctgtggccccagaaccccaggcacatttcgttccccttccccccatatcctacaactccatgactttgttcgaccgtgagaccgacgacgccaaatcaaaaccatatggaggcattctgtccgaagtcgaccaggatacatccagaacactcccaacacaattcgatcgcgaccgattcgaacaggcacgtctaaaagccgaagatgaatggcaacagaaagtgaaagaagcagaactcaatggcgaaaccactgcgcattcatcacaaaaggtttctggccctccttcaaagatcaaatccatcaacttcggtggctacgagatcgaaacctggtatgcagcgccctacccggaagaatacagccgcaaccgtgttctgtacatttgcgagttctgtctcaagtacatgaactcggacttcgtcgcctggcgccataaacttaagtgccctgcaaagcatccccctggcgacgagatctaccgagatcgatcagtctcaatcttcgaagttgatgggcgcaagaacccggtgtactgtcaaaatctttgccttctcgcgaaacttttcctaggctccaagactctgtattacgatgttgagccattcttattctatgtcatgactgagtttgacgatctgggctgtcatttcgttggctacttcagtaaagaaaaacgcccaagctcagcgaacaacgtttcctgcatccttactctaccaatccatcaacgcaaaggctacggaaacctcctcatcgacttctcatacctccttacccgcatcgaaggcaagaatggatcgcccgagaaaccgctctccgacatgggtctagtgtcgtaccggaactactggcgattgattctatcataccaacttcgcgatttgaagacgcctatcagcattgcggatctgtctgatcgcaccggaatgacggcagatgacattgtatctgcccttgaaggactccgagctcttgtgcgggatcccatcaccaagacgtacgccatccgtctagatcacaaatattacaacgaggtcatcagtggctgggaaagcaagggctacgtccagcttaatccagatgcgctgctctggacaccttacattatgggtcgtagtaaccagtctcatttcgatcgtgctcctatacataccgtcgcccctcgagaggacccagatgaggatgaagaggagaccgaggcaagagtgaccgactatgagggcaatggccgaatggcgaatgcgtcggatggagacactctcgcagactccgctggaccgccttccacattggctctgcggcataacggctccaaccatcctacagtgggcaactctgaaacatcagcaatccccaaccctgctgctggaatcccaccctcccggttcgaactttggcctcctgtgcctcccgcagcaccccccaaacgcagacctggtcgcccgtcgggtagcaccaaactgaatagcatgtcaacgacacctacgtccgcccgtaataacggccgcaacacacctcgacgaccctccgggctggcaacggtcacccccggaggcagcgttcgtcgcgggagaagatctattctcacggactcgcccgcagctgaagcgacacctagccaggccaatggtgttgaaccggagaagactgaacctgttgaggaagaagctgtcgttgacggggatgccgaaaatctggctcctgaacttagggaaactgcagatgtgagcgaaaaagaaccggagcatgttaatggagatgctgcccccaagaagcctgtcaagaccaatggcattgatgctgctgagtcagagccgtccgaggacaaggacacggaggcacccaagacccccgagaaaaagaccaactccatccctcggtcacctggaacagcggtctcccgtcgatccaacgataaccccaagacaccgcgatcagtcagccggaaggctttggtcgagaaagttcacgttgtgatccccgctgagtcaggatctgcttccaagtcaccagccaaaggccagggccaaaaggctatggccaataccaatggcaccgacgcagattcagacgcggatgcggatgcggacattgacgccgagtacgaagtggatggggatgtcgtgatgcagacatgataatcttgaagctcatgattcgaggaggttttctttttgcctgcaaagcaagttacgcatgtggacagggcgtttattttaacgaaattttctgattcctttatttctcccttctcttttctttcacgtgtgcccgggaactgcattgtcccaccgtttgatttaatattctttctccatttcttttctcgttcgaaggctaccttacgctaagcgggcttgcaggggcgataggggtgtcgtgcgacactcgtcaatcccctttcgttcatttactactagtcgctttttcagggatttcatccagcacggagcagggatgggggtgtctggagtttactttttgcttgggtgtttcttttctctttctatctagttgcggcgaatgagtacagtgtgtgattagcatatctcttgtcaatgtaccaattactgggtagctcatttctccagtgtacaatttctccagtgtacatacaacatacggagtagatctgtgccttgcatgtgatatatcgaagaataagtgtcatgtcgcgcaggacgtgctggtaaacgtcaaaatgggagagacctgttaggtaaagtgccgaaactggagaaagaaggttaaaagtctagacctaatagccaatcatattcgcagcacctctccgtatgttgtatacgaggaacaaaatgtccctggttacatagaagagtgtacgagttgcaacttgcccgccttcttcggccatttaggtacatagctgtaaaacgagaaaggggagaagaaggccattaaaacatactagtaaacagactattccgcactaaatatattaatatgccgcataaagcggtcgactattgtaattcttgatctcgatagctgtggctgatcagcggctatctgatgtgttccactagggggccatactgcacatcccacataagtacgaactaccccgtttaatccttgcagtaccaggtctgcaattggcttggtcgacagaaaatacacaggaagattcgagcaatagtcatgaaaatcacaattatgcatgagtctattgagtatcccacaacgggaggatttcaggccaacccttttaggaaggtgagatttgcattgggatactcagccggggggacgttgggatcagcttaccaatacggagcacaggtgatagcaaccaggattttccagggacatacagatcagaaggatacgagatcatactcatcataacaataatatagtaagcaatgtagagtcccgacaaagcgatcgacaagagatcggcatggcgccaacacggacagctgtcaggaaacacaaccatggaacggccccaaaccaccatggaaccatcacaggccaacatttaagcataaacacagtagcgcccacttagcagctcctaaccactggttctcaatggagatgccgctgtcatatatgcgcccttgattttttggttgttcgaggtactccgtttaataattcacttcaccggtctgagtctaaaaatttccctatcccgccccgtccagtaccgtgttcagaactccatagtgctccatcgccccccttcttacttttccctcggccacttcgtgcgttgaagtgccgaacacgggttcgttcgactacttggcctttttgggttctccacgggtcccctttgagtttgttttggtcctcttattactgtagtcagtagaacttccccgacactagcaagttcccggtttttccaatcggggccgcagtggattttggccagggtgtgcgttgtacttttaaattgggtaaaaaatttgaaaaattcgcttcctttttggcggtcacttttaatttttcgtttttcgcactcgaactttcttttcttcttttctttcttcttgtccctacttgttagcaccagtatcacattcaccttccgcccaattattccatccagcgtctggacgagtcatgatagtttccacagccaaatcatgacctccaacagaggaaatggcggctttccccgccatgaccaaggtcagacttaggacttctgtcctggcgccggacccggatcccggaagtcaaaagaaagtgacaggtcgtgctcccagcgctggggcttgcttgtcgcataatgatgtgcatctagggctttggagttttttttttcgggcctatcaactgcattcccaggaacttgtcgctcgggcacaatgcaatggacaagaaccgcagttcaggcccagtgagaccaagcaatgcccacaccctgcgtgtgtcttcccgctttccaacccctcattttactctttttttttttccctctctcttcctcattcgacctcccatttttgtcggcttacacttgtcagtttggcgagtcgcagacgctgttctctgggagctgagcactggcgttagaacaccccacagcgggtccaatctgctccagtgaatggacttgccaataccgatatgactctggccgcatgataaaatattggggccggacttttgtcaggctgatcggcactttctgattgaaatcgattcctgctgtcctcacccttgcatatgatcgctactatcaaagctcccatgatgtggagatacaacttaggtcgtgaactgtggcaagaatgcttgtcatagccaactgcacctgcagccctccgtatcacattggcgagcaatgatcatcgccgtgatgccatctcgacctgatcccagaatatctgcatgcaagttagggtttggtatgtcttttttttttggtgaatcctgccaagaaaggacctgataaacgaagaggacaagcggtctcccaagcccagacagtgtgggatgcaagttcctcggcaggacacagcagccaatgccttaggacggatccacctgtgtacagccaatgcagccatacccacctgaaaggtgattgaactggaggggaaaaaagtacacattctcagccgcaaatcgagggccagcgagtgtggcggaaagcagcccccgtagtccatactagaaagtaccggtttatcttttttttttttttatcacaaactcccgatctgcaagctgcaggactgcccgaacccagtctccggtattgatgtgtttcttttttctttcgttggctgatgcgtgtccggccctatagcttgatcgagggattcccggtcggtacaaccaaccagcgtccacgctggcccccaactgcagtcgatatacagtagcttgcatacgatcttggggctgcatgtctctcaggaaatgtgacgcgtcacgaggaaagccctccgtgcagtggtgcgctgttcgctgcatttcccccttaaacgccttgtcccggtctcctgcactgcatggattttcctccttgattctcttcaactccttctctcctctcttgcttcccgtcgcatcatgacccggcatgtatggtttcgtcgtctcggatcggaataaggtgctcgaccagcgctctcgggctttacgtgccactgcacgcgattgtatctgtgggcatcatcttgctcaatcatcttgtctgtgactgtaccggacctccttcgaatgcatgttgcgtccttccaccttgagctccgacattcgcgacattcatctcttcaagtggtacacgcagcctcaagcctgcgatcgaagaattcacgatattcgaatactgaatttatcacaggaagaatcattcacaagaaaaaggtattgtcacttcaattattttttttttgttttgttttgtttaaggggatataggaggaggtgcccaagcgaatgtgggagtcctagggcctgaaggcattctttggttcgggatgacataaggaagttagccaaccatggttggaagcctttgacaaagcggcagcgatatccgcgcttgttggggaagacctttttgaacttcaaaaaaattgggatttcttgctgtttgaacatccaagctaattatttcaggattgagatcgagtgtggagacacaggcacaatcccccggacataggcgatgcggcttgatcgtgcatatccccacttttgactggaatgcttagacgccggaccagggcccgagtccacctggcgtttaaaacacccatgagaaaaccgggtctgatcacctgcatagccggcgccaaccctgggctttttttctttttttatgatcataaagaaacagacgcggactaacggacaagcggttcgccgtttcttcctttcggaccaacgagagagggaagagagccagaagtttagtgcgcatccggatcgccattcgccccctcaaccgtgggtagctgaacctattccactttttctttccgtctacggttttaattcctctttttgttttctttttttctttttttggtctctttttggtctctttggtctcttgggtctctcttttccaaggcaaagtccacgggttacacttggtctttatccacctcagctgctctcgtttttgaagagattgctactgtggtagacaaattcgaggatctcttttttttggatttccctattttcttcttttttgactttttatttttcgattataatcctggataattcattgggttagttgaattttttttttttttttttttccctttctatttttctttttgcttttttttgtgggattctggactctgatttgttcatgagctgggagatttggaagcctgtgatccaattgattttctgaatttttttctgaatttgaatctttttttccctttctccccccaggttattgataaattcgtttagattccaatctcggaatatctactatcggggcgccgttattcaagagagagccgcttaaggtttttgtctggaaccgtgctcggttggctctttccgcttgcaaactgacgacaccactccgttttcgtcacgttcgacacatccatctcccactctctctatctctacagctccaagtccttcattttgtccttctcttccatggttcaactttgacgaaatcagaaaagaagaagaaaagaaaagaaaaaaaaaaaaaaactcattaccccactacagctgccacccctcaacgacatcgtgactcgtccagggttcttttcccagcctgtccttatcttctctgaccactggatttctctcggtccaaagacccgttccttcctttccttttccactttactttgtaaaccacagatcacttgaaactggtctcttgtattcccgaggatcgactcttcgtatctgctggttcactacctgtcaaagcaacctcaaattttgggggctctctccacctttccttgtttgtctgtgactcgtcttgatgagtgcgacattctccgacgcctctctctcgcgcgaagctcaggggtgagtcgttcttcccgtgtctactttgacagggtcgcaactcttacgcggtcgtccagggaatcccactgacaatgttgaacaacaccagttctgactttgacttgatcattcgccagcagcccaatagggcccgcgtggcggggggcaaggaaaaaggtacgtggaagcttcttgctctctctctctctctctttctcttgttcctagctagtccccgtgaaccggggaggcgcggaactgacagaaaaggaaccggatctaatggcgcctacagagcgcaaacctatcgatccgcccccgatcgtccagctccgggtgcgggaggagggtacctacctcgcacagtaagtggtcatttcactctggctttgcgcgggtagctgactttggcgcagacattacctgcaaagcccttactatttcatgtgctgcagtctgtacgatgcaacagaagagcgtcctgtgcccgtcgcaccgtcaactgcattagcaggaaccctagtttcgtcccttcaccggttgaaggacgtggacaacagcggttagttctggctggtcttggagtcacaggccttgttcactgacaggttttgtagatggtggatttttcgtctttggagatctctctgtgaagattgaaggcgagttccgcctgaagtttaccttgttcgagatgcgaaagtgagtaacacggtcgggagcctagcccaggttcaatagctaacaaagagccaacagggaccgtgtctcctatttaaagactgttatctcagagcggttcacaggtacgaatctacgtgaagagagctggcacagttgagttctgacaagcttgcagtctcccctcctaagagcttccctggaatgatggagtcaacccacctttcccgatcatttgcggatcaaggtgtgaaattgcggattcgaaaggaacctcggaccatgttgtaagtgctatgaacccatggggatgcgaaggcgtgtagttaacagccgcaggaaacgatcgacacgaccagacgagttccatcaaccagtccccactcgatctccggaacgtcagtcggtgcagatccctccatcatctagctatggaggctatccgccggcggcccgggattatgggtactacggtcagcagccgccggtcaagcgtcatcgtacttcgatcgactatggcagacagcaaggcctctatgatgtggatggtcgaatggcccgtcaaatggatccatatggccagccaacagctgctatgtacgctggtcagccagcagcctatcaaacgcctgccgccatgcagacttataacacaggacaggtggtgcctgattacacggcggttcgtactcctaaccccactttgtagattttgggagctctttgagctgacctccgttggatagatgtaccctggcatgcaagcatcagcgggtatgcaagcatcagctcccatgtcccagatccccgatcctaccggtcaaagccgatccagccagcagcagcaggccgctgtgggacaactgatggcgatgaaccagcctggcactcctgtacgacacccctctgcgaaccagtgagagtgtggaatagaacacctagctaaggattttggaaccgagacagaccccggattcgactggagccatgatggctcagggatatgcccgttccggataccctcctagctcaactatacttcctcctctccagcggagtcgcgactatccccaaggaaccaatggatccgcgcgagcctatttcgaccaaactcctcaggcgaatacccccattcttccatctcaaatggtcaacgaaggcgatcgatttagctccgtgaccggcccaacaacctttaatcaccccgattccccgaatggaacgccacaatgatttgcttgacgtcctcgatgttctggcttttatcttttctttttcttctgtctcgatagactgggaggagtgtttcactattcttttttttctttatgcttgatgctttaactgggtggctaaagggtttcattttttataggcgctggcggatataaaagggggaggtctttctttcatgggattgggagaaaagtgagattattcttaagcccttcttgtatatacaggccctttttttttttttttttttttttctcttttgaaagcagcatcactggctaattgcaagtgctgcttttcttctctttttctttttaattgacgatgtatgaggtggaaatgcaatggcttaatatcttcacgtaccttcctaatgttgtttgctaccttgattttccttcttcaacttctcttctcttctcttctactctctactccttttttgttttccatcttctttcctctctatcagtttcccttctccatttgttcatctccattcatctcagggagcccaccatggaacccaccatgaaccctaacggcagccctctcagcaacctcgatttgtggtgcgactggagcggtattccagaggaaccggtgtctatcactattgccatggaggtaacactgagaaccaggcaatcctcgagtctttgctttatgtctcggtactgactgtcgtctgaattaagctacaaacctgcggtcatcccaacctccatttaccagtcctcaatgtccagtcgccgaacatcgtcaagtgcccgtcttgggtcatccggttgaagcccgacttccactatgataccgacactccacccgagaaagaagcttggcgacctggccaagaatatagtgatgagaccgagagataccctgccaataatgactctgttgcggagtctgcgagagttgttgttcacgatggttcgcgggatgaaggttcccaggatatctttcctcgtactgtggatatctcggggatgtacacccatgttgatagctcgggtagcccaacctcttctggccctcgcacgagccaggtcgccagcttgggcagcccacgctctccaaaccctcgtaagagatctgccaaggctgcttctctgccagactcaatccctcctgacgatgagtaccaaggcacccgacacaaacttacgatgaccaagatcgacccgtcgggactggagcctgtgtcccaggatagcaccaccaccgagcagatcgtcacacccattcacagtcctcccgccagtcttgatgaaaccagcgtgatgcctgagaacatcccgttgcctcaagactcgactccaggtcctgtgtcagtttcgccgagcgttacatctacatctgagcatctctcgctcaacggaacgacagtggcggttgacaatgtacctgaactcgacgaaacacctcctttgcacattgcagaaactcctagcaagattgatttgagcggtactaaaccgcttaccgaagcgaacttgctccagcggaattatgatacactctcgactcgtgggtgcaacggaagcttttctgacaccggagacagtgacaaagaaagggaggacttgcttctttcacttgacgcaatcggatcgccattatttttctcgtgccctgggtcgaaccctctgccccggacgtccgcagaaattgccgaagagcacaagtcccagctcatcttgcacaatgatattctttacgtgcacactcctcccatcgtctactccgcgacataccaaatcgcaatttcgctcaaggtcaggctgcagaaaggaaaatcaaaggattggtgggagttggctgtgagtggactgcctcgactcgcccaattcgagtctggctatctctacttccgaacacccccgggtcagggtatggaatttgtgacttcatctttcaaacggcatacccttgtggaaagctgcttgatggcccagtttgacagtggaaaaaacctcgtggctgcgttccgtaagtgcaatgcagaatactacggacaactcaaggactacaaagccaatacagtgatacggatggaggtggctgagggtccatcgtcctgtctgatcaaatacaatgctgtttgctccattgatctcatcaaccacaacttctgggccgagaagtgcaaattccgcctttttgtgcatggcggcccagagggcgagtttgacgccgttttcactgctaaaaagcctctggtcaactctattcggctgcaatcagatggcattggaatttcacgcatcaatattgtcagcattccgcaagctctggacatgttcatagtgtcgtgggaggtcaatctgccacgaggcaaggctgtcacttggcagccatggataaaaaccacgttgtatagcgaggctgaaattatcctccaagaagattacgccatttatggtcccaatcatgaaattgtacttccgaagtatctgaatgctgatactagatgtcagttttcatgtggccaaccaggaggtatctgtgttccggagcttaattattttaagccccaattcactcgacctccatatctccatgatggtttcgccattcacaaacctagcctgacagggcctttatctggcagaagtcgagcttccaagtctacgagtacacagaccctagttgccgagactccagctccggtcgctgggccaaagaagccacgccatgtacgcggattacgcaccctgtggggcctggccaagttctttttcttccttctccatgtgcttggtttcgtggcctctgtgtacttgatctactggtcgtacttgctgcacaacagtgtgttcggcgaagtctatgtctatggcccagagtacgcagagaatttcactaccaattctcaagaggcggagactgtcctggcggagtttaatctttatcctgagctgattcagcccgaatctcagcagaacgtcaacaccaaacctgctgatatcaccccaatgcccctgagagaccgcatcgattaccttctcggatggcgaggaccaattgcgcaggagtaaattcattggtgatgggcgtgactcaggataatttcaaaggttacggaggagaataccgggatatgaataggaaatcgcagaatcaagtgccgccatcggtagatttagcagatagcaaacatgaatacaaaaagaaaatctattgatcaagccaacgtatacgtactatactaccttatattccagaagaagtcaagaaagaccaaaaagacggaaaatcaactgtcttatccagttcgaggaatcgactacgagtctgagattttgacccgggagtccaacgtcccaagtgagtggacaccatatgtcgcgccgatgaacaatctgaatctgctaccgatgaacaggactgggaggccttaggtggtgaacaatacgatattcaattattcgtgcgggacagaattgctaagttgtaaccctggaatgacgatgaccacgatatatctagctgtataattaagaggattggtttgattgacgcccttttgtttttctttatcctcggtaaaaggaagtagacacgggacgttcataagtaggtagcctattctttgaatccttagcaggcctgttagaaatatcaatacctacagacgggtgagtgaaagcagaggttccctgatcaggtagaccttgaccataggtagcctagaaccctccattcaatacatgactggatcatcagaccgcatcgactgccttgcagggtgtcgaggaccaattttgcaggagcaagtcttttgacgacggagatggctcagtatcgttaggaagaagacctggcttgaatgagatattgcagaaggcgtaggtctctctacagttactagataaagtaaaaggcaaaaccattaagccacttgtacaatatcatttagtcagtatacacaactatacctacgtccgattcaaataatatcccaagatcaactcaacagcccacctcaaaacaacatccatccctgcactcccacagcccggagcaacctcaaccccaacatccctcctagccctagtcccatccccaaccctccgaacaagatcctcctccgccagagcaccgtccccaccctccccatccccatccccatccccatccccatcctcagcaatcaacaaccaagcatgatccgtcacataccgcggccaaacaacatcatccacatacccaggcggatcgacccaaaaattctgcggtggccgatcatcctcagcatcaagatcaacctcggtgctagtcttcccatccccaccatctcccccatccgagctctgcactggcggttccggcgccgccccaatagtcacatacccactcctcccctcccgcctcgccttaacaagctcatacgccgcaggcaggaaaagatgaagatgtatagcgtcatgcacggaacggaggacgtgttcttcgcccccggattcggacggaggcgcaaatagcaaaaatccctctaggaatgcaatagtcgggttctcggtgcttttcctcgcctcgtcctgcaatcgagaactaataatacctcgcagctcctgcacgatctcgtctggcacgccggaatcggttgcgtcgttttggtcttccttgctctggagtcggggtgggagggtgccgttttcgcggacgtagttcagtgcttgggtgaggaaggggatgtcgattgcggaggctgtgtcccagtcttggattcttttgccggtgcgggttgttgtgtatgggattctggggtttgttagtgtggggtttgtttggggttggggttggggttaatgtaggattgtttcgctgagataaggtgggtatatgtatggagctgaagaagaggtatacgtacttatcgtctgggaaatagaagtcatcttcgtggattatgaatgtgtttagacgggagtccttgggcttaagatccaccccgtagaatacacgctgcagtaaccgcgcgagggtcgtcttgccgctgctcgagggcccggatatccctattaccacggctttctcgtgaactggcttcattgtttttttctgggttggggcaattggagaattgaagccaagtgaggggtgagatcttgtcaaaaaggcttatcttcttatcgggtttgaccccgcagattgctacctgcatgtatgcatgcggatataagagtggtatttaccttgttatacctaaaagaccccgaaaagacaccggaaaatggcatccaaagatgtagctgcttacatatgacctattatcatggtaaaaatcagactatcagtcttataccaaggccatatgagactattcttctcttcctactccaaatcacaagtctaaccaggacctaaaaggttacatacatatgtacgtagaactgatacccacctgggcatattaatagcagcagttaacacctgggcagctagctggtcccaattttgagggatcacgcgcgctctaaccgctagcctgctttatcttatgttaccatgtatccttggtgtataaaccaattcttttttctctcgacttgaataagtaaggtttctatatgggtataaagtacgcagaaatccgacatatcgctagaacgtaaaagtgtgaatatgcatcatggcccgaacggcccgaacaacgagacccgcctctcaacaccatcctggggtaaatctggcccagagtgcatcggcatgtattgcgctggaccaacgctatcccacatgaccgccacgtgctctccaaagccagcccgcggaggcgcagaaacaggagccccagcaccaaaagttgaattcagcatgggaaccggctgcacacccatgacctgatcatgctccgcaaagccaatccgaggcctcttggccggtgacccctgaacaccagtcgaatcggaatcggcatctgactccaaggtccgcggtatgcgcggcggtctgggccgcgatggcccgcgcgcagggaccacctcgttatcaggaatgggcaatttatgccgatcgaatagaccgagtggatgtgccagcggagccattccggccgaagcctcatccggcatgggtaggaatggctcgttctgaatgatctcgctcatagtcttatcgtccaccgggttctttcctgcgtgcttcgtttcctcgtcggtcatgtttttactgcggttgagcattcgatgttcgagggtatcgcctaagacgagggtttcgacgtagacgggtcttttctgcccgattctgtgggctcgtttgatggcttggctctccacgttacgttcccagattgggttgacgatgtacattcttgaggcttcggggatgtggagaccgtgcgaggcttctttgacgctcatcagtagaacgcggacttcgtgggtttggcggaagtcgctcagattctcgcttttgagattggatcccatgcttgcggtactggcgtatgtgcggaatttgactgctattaggtccaggccttgctcgacccaggcagcgacgttgtcatgttcgtagaagatgatgatcttgtcggttttctcgaacttcaagacttgctccaataagtaccgaagcttggctgatgctactccttccagcttcgtttgtgtcaagggcgaagtctccgggagagtgcggaagatcttcttctcgaaagtttgatttttcttcttctttttcgaggtcgatctgtttaccggaagattcgtcgactcggtggcaccactgtgagcagaaatagctgtctggctgtgtttggttagctcccgacgaactttgataccctctcccgcaagaccttcagcgggatcaggcgtgcggagatggtgcatcacaaattcttgcgcgcgacgggcctgggtcatacccatgagcaggggctcgtggtcagcgtctgtgccatcaagcgcccacatattgcgagcatgctctgggaaatgccgaacaaagactccaagctcgtgcatttttttgaatccattccagccagaggaactcattgcctttcgtgcgatctggattccttgttttaattggttgagatccgccactgtcatcttctcctggttttcctcttggtattctagggcaatgtccacagtaccttggacatcatcatccccagcccaccaaaatccagccagacgtaagttctgtatcaactcagtgagcttcttcctgttctttttgttcgtctcgtcaaacatgtagtcaggaccttcacgttcagatgtaatggcgttgactgcgagagtgaagaggaatatgttgatgtacagacggtcgtagaaggtcggctcaaggtagaccaccttgttatacagtggtggaagagtgatctcctttttgaccgtttcataccggtgtcgcacaacaagactctggagagtggcacgtagtgatggagattttcggggcattccatcttcgcccaccgttcttgtgtgagttttccaacaatcgtaggaattgttcgaccaaggcttgagatccaagaaattacggaccatgaagcccaatttatccagatttctgatttcatgttcgacgacatttcccgcttttttgcggggttgcaagaaggcatgctcgtccggtgacgattcagtatcgtctgtgtccatttcctgtgaagcaatgctaagttccaccccgtacaattctgagagaggggttcctgaaatcatccagcgacgctcgaatttcagctttttgagcaagtcgaccatttctgttgttgtactggcaaggtcatgtccttcatcgacaataactcgcaaccaatgaagattgagaataggagattccggcttctgtccatgtttgtccggtttggggttctctctgttgcatcggcctttggagaaaagcacaatatcgaagttcaggagttcgtccgttgatggtgttttgtccttatttcgcagtattaggacattcagatcggttgtgtggatagcgatctcacgttcccaatggtccagcaagttatccggcacaataacgagtgtaccggagcagagaagaattcggttggccgatcgagtgtacgctgaggcttctctttggcgtttgcttttcgctggttcgacgtaggagccactgttggtcacacaagccttcctacaattactataatctttcccgtctgccagcatccggtcgaagtggtccttccagggcagggaaaagcgaccagcagtagcagcagccatttgcattaatgttccagtcttgaacctgatggggttattgagtgtctggtactccacggggattttggggaaatgtccccgcgtagccaatatcacagcaagactgatgagagtttttccgcatcccatagactctgccagaatccctagtaacagtcagtatagttcaccaatatattcataacccgcccaacaataattgagcagtcagcgccgaatatatgagtacccacctccacaggcctcgggatacaaaatcttgtaactcaaaacggtcccagactccttatcataatagaactccgacccagtcggaccccgccaaggctggaatctcggatcaagcgtcagcgccggcgctgtctcccgctgaaccatcacagcagcagactcgcgctggaactcataaagcgttgttttaagacctcgaaccgaacttccaagcagttcctccatggcgttccgggagtgcaaatctgttacgtggttcaacttcagagtgggttcttgcagcgtattgaatatgtaatatagggattcttcttcgctatcgggttgagctttcgcatttaaaccagcacgggcgccagccaagccgttccatgcttcagaggttctgtcaatcatggacatgacaagcttgagagcggacctgatagtcttctcggaatcgccacgttttcttaaaatgggcttcttttgctgtgcctctggaagcacaaagacctgtacattgttgccgtcgctaagggagcgtgttcggatccattcgtgcttttccagcaacgctatctcggagctcgggtagaggagcgtgcatgagtatttgcgcaaaatgccggctgggatgtagtgatcaatacgggaatctgttgcctctgggttatgggtttcaagaggcccgtctgtcacatctgggttgagaggcttatttgcctctgggatgaaagggttgagaggcccatctatcgcctctggggcttcaaatttcacatcgggctgaggactactagacggcggcacataaggaagccctgaaggtaaatcattcacctcaataggtgttctgctccagccgcccagggtccattgggttagctccgacatggtggatagttgcaagagagaacaagatgcatggacgaaaccatattcggagatattggcagaatagtgaccgcctttgataagcggctccgccctactccagacctgccgggttggcgtgtggatcaagagggtccgagcccccacgggttgtttaggacgtccctttccttcttgattacattttacatcgctcaattggtatattaacctcgttacaatgtttccactattaatattattattagaagcacgatgggccatcatcaaattacaatctagtctatcacaagcccaaccaatgaatccttgaaatccttgaacaatgcacctaattccattctctgtcccgcccccacagcaggcttgagcctgagcctgagcttactgagtcaaaaagtcctcaatctcaaaacccatccgcttaagcgccttctcctccaaatcccgcccaacaaccttcctcagcacaaccgtgcgcgcatcctgcagccgcacctcaaccggattcccacccacacgatccagctcctccttactgcactcacgaatgtaaaccgtgatatcaggacccacgcacgcgcgccacagcgacgccatccactgccagtggtcaagcggcgcataggagtcgccgatgggcgtggagcaggcgaatgcgtccgccgtggtgagctggtagcgtgggacgagtgcgattggcacgccgtagtgactgcctgttgtgatggcgctggcctcggagccgttctcgctcgactgggccggggagtggatgtgcaggtttgcggtcttggggatgagggtgcgcggggagacgttgggggctggggtttcctcgtctgttatggagcgggcgtcgacggagccggctcttgaggtggatttcacgaagccgatgacttcgtcggagatccggtgccaggcggagatggtgttgaggtagtcgactgtggcgtcgcccatctggccttctgcggaggtcgggcggggtgctttgatttctggaccgtcgaagacccggacgtggtactttgtttccttttttaggaggttgttgaggtattcgacggctgtttggacgaggtctgggtcttggccgtccacggcgatgacgggcccgcgggctggtggggtgccgtcccggaacgaggggaggagtggtggggagatcttggcgaggactttgatcttgttgaggaaggggattgtcatgactgttgcttcgacactggacccttcttgtgggtagggtgtcatgggagtcatcaccggtgttgtggtctggagtggcggtagcttcagactcgggtccgggtgtggttgcccgggaacattttgatatggccgttgcggttgaagcatgggtagatggcgtggcggcatatcagggcgagcactccaaggggtcatcgggtgcggtgactcgggaacgccactgccaggactgcggtcccggtaggagggatgtaaagttggcttgaatgaaccgtgagacactcggcggcgtttgttatcaggagaccgaccaccgggttcctcccagtgtctttggcgagaacggggatcgtgatccgtctttgccgactttggtactggattggggtccttctcgcgaccttggtgggttcttggcaagccatttgggtgtgcatttgggtgtggtgacggtgctgagaagttcgatggtggtcgatacccagacccactgctgggtgtgaacggagtcatgggggaagcgggtgcattcatcagtcgaccaccacatctgttacaatgtgatgaaccagacgggttgtgcccaatacctgaggccgcactccgagcgctgccatcccgaccataccgccgaggctggtagcggtagtccgggtattgctgctgatgccgtgctttttcctcctgtgattgttagcggtcgaaaccacattggcggagatagttgtcttacctctgcaagtgccttccatttactcttgtcatcctccgaaagggatcgccactgttccccgataatcttggagatctcgggattggtcaagccagggttatgagcgaccaccatggcctgataatgctgacgatacaggataaaagctagatttttgcagagtattagccatgtccatgttcgagagatccgatctggctaatgacgaccaaaaaagaaacaatcgaaaagcacttgccaatctctaacgatgcggacaatatcgactcaccattacgaggccgggggattttcggatccggttgacagaggcagaactgcatagcactctccttgtgtgatttgatggggctggtactgctggctgaagaagaggaggatcggtctgatctgtctcgcaagggcagttccttggtggagatcatgggcccgacaggcttgacagagccattggaggacattttgtgtgtctctttgggcccgttcagggagatatgttgatgtgtctggtgtaccgttgaacggggatcagagtacctgaccgaagccccaactggaccgtcgacagggtgtctcatggccatggcagacttgggcaattcgtcgttcatgattttgtgatcgagtaaattgctcggtctaggcagagtgacttgagcagactcatagcgtagagcaacagggttagggagaactcgatcgtaagacatttatttaatactttttttctctcaatgaaagggctcgaaggcgattgaatgaaagaagtagggccccaagagaaaggtaaaaaaaaagtatcaaaaatcaaaaacataaaataaaataaaaacaagtataaccttttgaaagagaacaagtgaatttgggggcgaccccaagaaataacaagaaaggaagaggggctagagacgagcaacaaagaaagagaatcacgactggagggggggaaagggaaataatcccaataagaaattgaaagaccggggaagacccagataggacaaagcgaagtctatgggcgtttggacaggaaatagttctttgtggtgttcgcccccggaatccctgtctagcctttctttgatctagattgcccttgatattcaaaagataaaaaagaaaagaaatataaaaagtacgaaaagaaaagaaaagaaaaagttaacagtggcttttctttgttataattctcctattcctacatatggacctatggagactagacttgaaaacctcactttccctatacttccaacgacacggtagtgttcagaagattaaccccaaccttggaaggaaaaataataaaaagaaaaaaagaaaaaaaaaaatgatgtgtcaactagcaaaatcaaaccaaatcccctaattccctaattcctttccctaatctccctagtattttagccaaggcactagagtcattgttttctttgtctcccggatgcggcgacccgtgatctcagggtccacctgtcacgttggcgttgattggtttcctcgtaacgaacaaagaaaggacttacctacttacctactaagtatacaggtatacaggtatactggttataatgtaataggctaattaaacaattattttctgtttagactttatttgattgtctagcattgtcacctggactgatcttctattatcgaggtagaggtagaatatattcatatttgaaaaactatgtaggatctcgatccgccgatccctcgatatcccccccgttacttcgtatagtcacttgctttgacttcgaacaataccaccccttattttctcttgtctcgggtaatctggatcttcccgttttccactgcaagttccagtctactggtttgacatcggtactaccgtgttaattcctgagtcagtgagatccacttggtcctggaacccgcatcaagtatagtgcgtttgatcgggtagcgacatcgctttagacactttgcgagacgtcatatttgtcacttttcttttcttttttctttttcttttcttgacttgtttgtctgaagaattagaattctcattgatctggacaatgtctaagctgcaaacccccgtcgggtgtggcgccggacacttcccacttccttcggattcaacagaatctcaatcccatggtagatctccgtagccatgagccggtgagctaaaggacccaaatgcatttcgtccctgaagatcaacagtgtcagtgtcagtgtcaccgcggagactagcattttgacatgtcgatcccttccccccacgtttcttatagaaatagtaatgacgaacattgaaaaaaaaaaaagaaaagaaaagaaaaaaggaaccccttaccagaacagatacttatctggatgctcacactgttccttctttgacatcatgacccggaacccactctccacacaaggctccacgacattctcccatccatccagcttcctgcctaaaaccattctcctccccaatacccacccccatagagctgccagtcacggatgcggtccatcataaaagcattagtatcataaagatacacagtaccactccactccctggccacctcaccgagtttcctatttcactcttccaagatccgcaccgtatccttgtcctgaccaccagcctcgaacccaaggaaagtcacgtcgaccgtctaaggcagaatgaccctcagccccgttgtactcaatcgttcggacagcgtatcaagctgatccataagcgttgcaatgcgtcgcttaaccgatttgctcgctgcgtcgtagtccttgctgaccaggctccagagatcccagacgccgaacaaaacgacgaagatcgtgcggtcctgtcgggaccggaccgcttctgcggaaacgtccttcgtcgcggctgtctcggcgtctagccattgctggagctgggacttgaagtctgttgggtgggtctgagattgtcggtctagtagattgagttctttgttgtcgaccaccgcgcccgtggtcttgtttttgtggatttgctgtctgtgctaggttctcttggtggcaggataactaatcgtgtttcagtggatctgtcagatacgatgcttgtttctctgtgttctatactttctcccaggtggttatcttaccattgaacaaagccagtccgtccatatcttgccttgtggcgagttgggttggttatcgctccatgagtccccgaatacgactaatcgctggtcgaatgtgttggctacttggaatgggttcggtgctaaagggacgatatcagagaaactccttgacgtcagaaaccatgctgtggtgagaaccatgtagactgcgacagcagacggtgcatagaaaccgttcaaaatgcgtgtcatggtgaatgggcggccagatgctaggtaggcccagccgggcagtgtcgatctcaggtcttctacttgtttcggataagagtcgacacgaaagtatggtaagctcccagacagcaatagcaatgcgacacaatgtaatcagaaaccaatatctctcaggttctgcggggaacaaagtattatcctccagattattagagactacgacgaaatctccactcggacaagaagcactggcaaggtcgggtatgtggcggtttctccagaaacgctgcaggaaaaagatagaagatagaagtaggacacaactgtcaagaccatgatacagtactagaatacacaagaagtagcaccgataaaactggaaaccccatattagtcgtggattcgtcacatctgtagattggccgcgtggcttggatgagaaccgagtagactaacatccgactgggcaaatcagagtcgccgatgtaatttcttttcgcttgtactgggctacaattgctcgatctggtattttcttccgtatcgaagcctcttgctgatatttgggttctgttctttcatattcgtcgacgaatagtggagatcagtctagacttacttacatctcatacaaagcccagcacacaaggccacgtctggtttctgttttgctttgtctcaagggatttgacattatttggccttgtcgtctgacacgaaattgtttcttggtactatggatatgccaagacattgtatactgcagatcgctagagcggagaagtgtgagacatagtgtctctattgggaaatagataagggagaataaagtacggaacaagtataaggtggatttgcccaattaatcattttcatctttctagctatgatacgaaggggacagacattcagaacacatacaaaaacacaccgtagtgcgatcataaatatgaccttggaacgtccctaatattgtcttgagccaaatggatcatatttccgaaacccccagagcttatccatctatccttatgagatagttcttacaaatacaggggttgtctactcaataatccatgcactggcgtttgcagtgtctgacatgcgaatggtccagatcaaaggccgggtatagagtcaaacatggttagtggatgctgttgattttgcaattgtcgtacaaggctcgtggtggctgtcaatgagtcgctttgtgagaccgtactcagtcttgatatataaaagttggagtttggcccggtcgagaccacatcatgacccgaaacattcatccatcattccgtttgtgagtccccgtcggttgcattcgaaagtcgcgctaggaggtctcacgcctgagtaaaacagcactgtgttgattcaaggcggagcaaaagctgtaattgttggcggtgctgaatatgtgttgtctcttggatgcatggttggcgggaatgagtcgtatattcatcgttgagagagttctttccaaatttttagcccctctgtaggcacccacacctcaacattctatggacatgactgagttgatgaacgaggaaaagaaaatgccagggtgctgatagtcagtcacatgacatggtaagttcccactaaacctcattaggaaacaaaagccctacttcccacacgtgacacgtgacttgcacctcgctaagccggcgaactaaaaaaatccacaatacggactccttcgacgacaatctcacaaatcgacaacacccgcgctaccgtcttgaccgcgccgcctccgtcaagatgaagctcaacatctcctacccggccaatgggtcccagaaaattatcgagatcgacgatgagcgcaagctccgtcccttcatggagaagcgcatgggcaccgaagtcagcactcccttaaaccaccatccttccccgactgtccgacaattcaatcgatgaacaacatacacacacatacgactatagagaacgactggctaattgggatttttgattaggttgccggcgatgctctcggtgatgagttcagcggttacgtgttcaagattaccggtggtaacgacaagcagggtacgcatacaatcccccattcccagcgtcgactcgataatggaaaaaatggaattcaaacgcacaacgaggatcaacaatgctgacaatttgaatttacaggtttccccatgaagcagggtggtacgtacacagccgcacaacaacctggggaataacgaaaaaaaaaaaaattatatccaaccccagggatacaagcaacaatcgacagcatactcatcgaataatttctacagttctcctccccacccgtacccgtctcctcctttccgacggccacagctgctaccgcccccgccgcaccggtgagcgcaagcgcaagtccgtccgtggtgccatcaccggtctggaccttgccgtccttgctctgtccatcgtcaagcagggcgagggtgagctccccggtctcaccgacaccgttgtccccaagcgtctcggccccaagcgtgccaccaagatccgtcgcttcttcggtctcgacaagaaggacgacgtccgcaagttcgtcatccgccgcaccgtcaccaaggagggcaagcaggactacaccaaggcccccaagatccagcgtctggttaccccccagcgtctccagcgcaagcgccaacgcgttgctatcaagcgccgccgtgctgagactgcccgtgatgctgcgtaagactctccctctcctgttttgtatgctctgatcgacgatctacgggtgtattggtttgattttgggaaaattatcttgaactaacggttacatagtaacgactacgccaagctccttgccggccgtgtccacgaggagaaggccaagcgtgatgagctccgcaagcggagggcttcctccatgcggaagtaaacttccaaacccgcggttttatgatttcgttctgcggcgatggggtttaatggaggagcttcacgtctctgggatgatttgaggggaattcacaaaaaatggatcactctcaggggcgcggaggatacatgtgtgataaagaaaaaagggaacaagaaaaagacacgggggaacaggtttcaaaacgtacaaagcaggctgagtggttgatactcccttgtgtttggctacggtgatttcgggccttgggagtcgcaatgcatatctgtgttgaacctacctttttttgatgaccctttttttttgaatggagtgcatgcaaatttcaatactcagttctgtcaattgctatctttttttcaaggagtaggcgtagttatatttggtatatttgtatgggatatatttcctctttgtgggctcttggtgtactccacttgaatggaagtcacttacgctagtcgataatgtgattactttaatttcccccgcttcggctgatttccccaaggtataggcatcggtcacgtgctatatacagtctcaatagggggggtggaaagacgttcagaattatgtttttcaaggggtatgactgcaatttgcagtcaacggtggatgtcctctatcagatgtgtttccgctccctctgtgcggctaatagtgccaaagccgtatgtatgttcttgctatagtcctatatatgttgtaggacgacagcaacatatcaaatcctatcaaatcaaaacagccgatttaaaagagtccatagcagcactacctcaatagaaaaacaccatgtctaattgaaagttgcagaacagccccaggccttggtaataaaatatcaagtactctgcatatgaagagcacacacatgcacgatgcaaccaatcccagccaaggataaccaacttccgccagagagaactgcataaagccaacatttatacgtcggtctctctctcttcaaaagaaaaaagaaataaaaaaaatagtaaacaataataaaacacccggggactatcatcctcgtccggctaataaaaagggtcataaaaatcgtatttttttgtttcccgctcactccacggttttgcgcaaccacagtaggtaatcactaggacaaaccatagatttgatcctctgtcctcatgcaataattaattcctgcctctgatttaccccacggtgtgcgagaacaagaagctaaccgactcgccgttgtgtgtacgacgacatgcctcggccaacgtagggctgatatcgatcgtatggatcttgtcgcaccgctcttgcttgtctcccagtggcacagtgttgctgacgataatgctgcgagagagttagtcaaaatgacatgacaccagaaatcaaagtcatccaagagtgcaatgactcgttgctggtatccgggcgtgtacataccgcttgaggcagctaccgttgaggttctcaatcgccttgccggacagaataccgtgcacaacgatggcgttgacctcggtggcaccgtgctgcatgacggtttcggcagccttggcgagcgtgccgcaggtgtcggccatatcgtcgacgatgatagcgaccttgtccttgacattaccgacaaggaccatgcgtgagacctcgttggggcgggcacgttccttgtgaatgagcgcgaattgcaagtccaggcgatcagcaatggcagtagcactaacagcgatctaaattagcccttgaactaccccagtatacacatacacgtgtggtatcgagatagggcaaaactcaccgtttggcgccgccagcatccggactgacgatgacacagttggcgacatcgaggttctcacgaatatacttgagcatgctgggctcggcgtacaggttgtcgacggggacattgaagaagccctggatctggctggcgtgcaggtccatggtgatgacgtggttgcagccggcggtctggagcatgttcgccatcagcttggcggtgatcggagcacgactcttgtccttcttatcttggcgggcataagggaagttggggatgacggctgtgatgcggcgggccgaggcggtcttgcaagcgttgatcatgatcaggagctccatgagtccatcgttgatatcgttgggtttcgtcgattggagaatgaagactgcaacaagccataggtatgagtggggggttcttgatatcacgatgaaggtgggatgcccgtaccatcttcgtcccggacgctctctccgattgtgacactggtttcttggttggagtattgcagaaccataatcttggtcaactcgatgcccagactgattcacagctctataattagccggtggcctagtcttgacctcgtcggttgcacataccggtctgcaactaggttggcgagctcgggatgactgttgccagtcaagagcttgatggagttggtcgacatgatgcagggctttgagaaatagtaagaagagtggagattcagttcaaaggagctcaaaacacactcttctctaagatgaccgtgttcggctcaaaaaatcgattttcctccgcggccccgcatgtctttttttctatgcagtctcgtgacgggctcaccgcccaatgacataagcacgtcgccagtccacgggtccaccaccctggaggatctataagtcggacctgcatatggaattctactcataatgactagtaaagaattacgcagcggatttgaaggaaaaagaaataaatgcagcaatctaagtacataaatagggcactggaaagaacacggttgacctgcacttcaaccgaatcccttaccaggtgcctcagttttcatcttctcataaagaaacttctcctcgctggctcatgccagccttccatacttttctcattcatccccgatacatagaaaattcccgtaacgaatcgagagaaacgccagacaatgctttggcttgatagaaccatttctatgccgtagaataggacaacagtctaggcaaacccgaagtactcactgccagttgtcacggccgtgtaaagacgttgacggagatcttcgtaactttcgtactcaggaagatcaagctctgttaagaatagttagtaaattgcgctaatgcagccaagaaatgcggagaaaacttacggttgaagcaggtatgcgagctaggaaggcgatccttatggccatagtcgcgatggatgttgaacttgctcacaccgttcataccctcaagttctttgaagccattgagaggtactttactggttccagtgacgaattgcaaaagcttggcacgttcctccttgtcaaatgagcggacggcacgccagaaccactggatctgcgaggaggacgcggagtagttgtgatactcggtgttgttcttccactcgtccacatcgatctcaggaagaccagaaatcaaaagttccagctcttgctcgttgaagatggagatcaactcgggaggaatgatttcgtggaaacccttgaggaagttgtctagttgctcgcggaccgattcgacgaggcgatattcgaccacgcgctgaacatactcctccttgttctcctgtgtaacgggaatgtcgcgaccaccgggcttcaggtcgatgacctgcttctcgccaaagtcatccgtttcaatggcaaatgtctcggtaatgatatcggtaatgtcgttctccagcatccacagaagggatttgtagtagtccaggtcgagcgtttccatgtccttgatagacacggatcgtccgaggatattcttgtagactgcgcggctgaagtgacagtcaagaacacggccttcgtacaaggccttgccaatgatacgcccgatgaatttgaagaacatgagatgctccgagttgacgccactaaggcgattggggtggaaggtagtccggtctgcagcgacagggatgaacaaagcatagttggggttgaacatgccgcgggcaagaacctggaaccattctctggtgacaccaccagcatcgacaccctcctcgccatggaatcgtacattcaatttgccatacttcaactcatctgcgcttttgaagtacaaggacttgaaagagtcaaggaaaacctcagatctgcgcacagagagctgaagaggaggatgagggtggcgaggctcggcgccacgggagtggacacgccgagtaaagtagttgcgcttgttgtcgaattccaggaccttggggttcttgaccaatagggagaacgtgccgctcatcaggcgagggttctggcggacgagctcattgagaatcttgcgatgttcttccgtgaacctgaagaagatgttttccatgctgagaccagcatcagttggggcgctgctgttgactgacaattcgcggctactgcgagacagcggctggtcctttagcgtggtgttcttgcagacgaccatcaatgcttcaatgagagggaggagaatagttgccacgttcagcatattttccttctgccgaatgacagtcaagcagtcgctcagcttgttccaaagcgggccgaaagtagcgctttcatagagttttttgagcacatcctccttgggagcggatggctcaacatccttgagcttgtcggctcgtgcctggtcaaacaggtaatcaagcgcggtcaggatacgtagtaatttcgcctggtctgagctagctggggaaaacttggctagagcaaggccttgcatgtcggtaccagtcctggcctggtggatatgaggcagaagatcctccaaatcacccaggatggtatcgctaagggcctgcgcttgagcaaccaactcatttccgatcacgtctctagctccagggatagcggaaagattgttgatggtggacagtgtatcgcggaatgtcttgccattgcactcacgagccgcgaggatgtggacgaccagtcggaagttgtgatccggaacgacaggaggttcgatagttcgcttcttgcgcttctcgtccacggtgggctccttggtaccttcaggttgcttggcttcagctgaagtagcctcttcaccctctgcggtctcttggccaggggctccaggggcttccacggtgggaagcggagcatcggtcatggatgtgtccatactggaatcggcagcctcggcagcttgatcggcaggcgcttcgatttggggtctctcgggctccttgcccttgccctcttcttgtcgctccttctcacgacgaaggagaacggtcaagggctgtgtgatgctgctaaggaggctggacagttgctccatacaattagggctttccattatcaacttgcggtcaagaagagaaagcagggcattcagagcaaacttgttagctcggttttctttgcctttgcccttgcgcaatgacttgagtttaccagctgaggcagagtcatgctctgtcaagaagaaccaagcaatgtgggggttgaactgcgaaaggaaagacagcgcggcgatacattgttggatgaccataattggggtcacttcgctgctgacgctcgaagcagtttggagagcgagggttcgcttagcctgcggcgtcttctgcattcctggtgcctttgcacgcagagaaagatgagaaaagctgcgttcaatcgcagtggaatcaacgctgccatcctgcaagatcgaaagaagaacgctgatcacttcactccggttctggcggttctcgcaaacattgtgaagaatatcattcaattgatggcgagcgttgccctggagaggcataaacattaggcgtagaagggttgcaacgccagccttgtcgagcatttgaacaatttgacgtctctgttctttctttggctcttggcctgcagcaggctcaattctctgccggggatcaatggcactcaaatcaccaaactgggccatgcgtcggccgctgccgcccataccacgggcctcagtcacgtactctggacctaaggttgcgagaacatcctcgggctgatcggccagaacagcctggcgcaaagagggatcgagagtggcaaggaagctcacagcatccatttcttccgccggttgagtgctagctgtagcgccagcaccgccagcagcggccgcttgtcgtcgcgcggtctcacgttcccgccggcgtcgatcggcagcttcttgttgcagcaattcttcgcggatctcagcaggcaaggcctcaaggaattcttggtttatctcagtatcctcctcacccgcggcggcagcctgggacctatgttcagcaagctgttgcatgatgacttcctcccgaagttcctcaggcagagcctccagatattctgaatcaatttcaagacccgtgatatcaacttgacggcccctgatgttcgtgtagactcgacgagcaggttcagtgggctggacttcgggttgagaggggccagctgtttcaactgcagtatcggtttcttggacgtcttccatgggctcatcgaccccggcagcttgacgctcggcttcctgttgttctttctctgcctgtagtcgggcattttcttcctcctccttttgcttaagttcgcgctgtttttcttcggcggcaatgcgatcctggcgttctttttcagctcgttcggcttgaagacgtttgcgttcctcttctacgagcttctggcgctgcttctcctcctccttcgcagggggcaccaagagcttcagaatggtgttgatgatgcgctgagtgcgctcagcatacgggctgctgaaactaatgcgggcctcttcttgccagcggtttctggtggtaccaagaccaaacttgacggcagtgtgagggtcgtcgccgcgagtgcgagttggagggcctgctcctcgggggattccaagcatatcttggatacgaccaggcaagaccgcccgtcggtcgacatggacatgaataccatcagggcgagtgacaacgccaaagcctggtgccgcttgtccaccaatggcttgcataatggcattcatgaagctgattgggctatccatggcaacaacccggccacctgcagggtccatagtctggccccaatcggcgaacggatcagcagcagcccgaggtggaacggcaggatctgggcggtcagtgcggacaagaagaggattaatgccatcgtcgttgctgcgggatgggatctggtttcggtggacacggtggtaaggctggatgggaacaagaccagatgggcgacccggcatgatttcagtgacggtagcccaagccggtggtgcgcctccgcggaagcgggattggggatgtcctcgggccattggaggttcatcgccttcccatccccatggctcaagaagatcatcatcttctaagcgagtcagcaatgatgcgagaaaatcattgggggcgttgaactcaccttccatatccccgtaagatccttgttcctcatcgaagtcatccatgtcctcgtcgagttcatccatttcatcttcgtcttcaactgggccggatgtcagcagggttggctgtggcagcgggagctgcgatagcagagtaaggaaggacaaaccgtcttcatcgagatcatcaaggatttcttcgtgaatgtcaccacctaggccatctccatggatattatcgacgttggagccactgagggcacggaataggtcgccaagatgttggtcttcaccttgatgccgggtggattgtctcatgtcggccatttcatcctcgaactggttcatcatctcgacctcctcttcgtcttcggtcatttcttcactttcccattcgtcctcttcgccatctccgaggctttcgttgtctcggtcaccaccgatttctccgtcatacatatcgtcatgcatgtccgaatggtcgtgatcttcatcgtcatcatcctcgtcctcgtcatcatcttcatcgaggatgacttcgactgcatctccggaaagaccttcgattggacccatgccatcgtcatcttcgtcactgacgacttcaccatcatcttcagcgacatcctcgtcgtagtccatttcttcgtcgtactcatcatcgtacatctcatcgtcctcaccctccgattcttcggtgctgctctcttcctcgtcatgacgaggttctagcatgccaagagtagagtggcggaagaggtcaggtgtttcttcgcgttgatcttccatgtcagaaacggaagttgctgacgagatatcatcgtcctcgttatcaccttggatggtgatgtccgagttttcgctgagaagtacggcagtctgggtaagtttattcaatggacgaagaatatacttgatgacacgcctggaggatgggaaattcaagtcgacatcggcgactgatgaagtgagcgcggggataaaattcttctcaaacatggtcttcgcgagctgcctggttgaagttgggaagcccgcgtcgttagtgaatgagtagccgctgagcattttatcgaagaggtcagcaagagacataagcttggaatacttggcatctaggggttcggtagaggccatagcatctttgtaggaccggagagcatgctccagcacaaaacggcggacaaaagcaagctcaggctcatcgtcttcatactttggctcagtacgacgcttgccaacgccaccaaattcgccagtcttggtgcaaagcgcaacaagcacttgcatagtccatgtggaggtgatgctgcgctttttgaacgccaaagtctcatcatgctccatggtaccgagcggaacaagcacgttcaacatgtagttgaggacaccagagcgcggtttggagggcgtggtggccagaggatcagccttccgggaaaagttgatgaactcaaccttggtccggttgtaagaggaaagaagttccgtcaagcactgaaggagcaagcagcggtagatgtaaatcggatggtcatctgccttgaattggggcttctctgtcttcttggcaccgcgagatgcttgtgcttcggcagtgctcgcaattgaaggtgttggctcgtccacagccatgtcaacgtcagtttgagtatcggattggtcagctgcctgctctgggaattcaggaccggcttctttgtcgtccacatccttgtaggatagaagctccgaaagcaggtaatgaataacaccatccgggttctccacaattggggctttgagttcggcacccttggttggagccttgcccttgtcctccttgctcttgtccgcgtcctcgggggcagatgcgtcgcctgctgcagatgattctgacctgtgctcttcgagaagaacgtcgggccttcctcgcttttgctgacgatctttgtcggcctttaatccaagaacctgtggacgttggttgtcatatcggagtaaccgcagcttttcgtttgtaacctccacaaagatatcaggagccctcagctcgaggtgctgcatctgtcgtacatagccgctcacgtcgacctgacgggtagtcttggactcaaagaaggcaacaatttcgctcctcatgatctgccggatagtagcttcatcctcgacgatgtgacgaagaatcagcatgaaggcgctttggagtttatcatttgtagcactggaaagttgcttaaccatcacaaacaagcgctgaaggtttcgtttttcaccaaagcgggcggcaatgctacgctcgcgagtgagaatgacaaggacacggcaaatgcagagcgccagtgtgtcatccttgcccactcggggtaaaatctcgacaagagcttcaaatagcctggtctttttctcgagggcaacaaagggctcctcaagacgggctggttcattgccggtggggttgggatcatcaagacttggcaggggccaggcgacctcaggaggccgacaatcatcagacaacagcttctcaagaataagcaggacatgtccaacccaagggaaagtttcttgttcggccttctcgggtgttgggagcttgataaatccaaggaaggtcgagaagcaatctttgagctcttcaagagtggcgcggtacatgtcacgatcttgaagggtcagcgcgagaatgtgtgcataggccgcaatctttttgccagctgtctggaagtcttccatctgcagggacactaaggattgaacgagggtctctccaatgtcgcgacggaagttaacaggctcgctatgcttcttgatagctgatgtgatcaagtcagacagctcgaaagagacatcatggtgttcgtttagaatgtccagggcgcgatcgatcaggtttgaccgaatgttttgcctctctgcatccagatcttcgattgtgaccatgtggcgacgtctggccggttctgcctgagaggcgccgctaggttcagaggagcttgtcccgatattacgactctcggaccgatgctggttcgatgactcccctcggtcatcgctatccatgtcatcattgtcgttgagaacattgtctagagctctagccagcccgtcgtgcatgtcggagtcaagatcgcctccgccgaaaggagaacgttgcatcccgtcatgtctgcttgctcgggccagaagcatttggagtgttgcagcgccgtctaacggattgccgttattgaaaggttgaacatctccaagaccatggtcctcgatagagtcgatgccggaagcggcttcaggtactccggtcttgatatcgccaggacccggcgggaccctgggaggggctcgtagccaccgttgcgccttacagtattcctcggccgccatcaaaagattgttgcaacgataaagggcttccttgttaagatcagaatccatgtaccctttctcgagcaaggcagtcgctcgttccgtgtgcacgacgaatggcttcttgggcacctctaccaagatgggcggcgtatctgctctacgagcagcgccagtctcatattccccatccaaggaagaccgcatgatatcaatcaataatcgaacaattggactcgatgattgggtcgcaaagtccgagttccacatgtctttggccatgggcaagatctccatgcgaagttccaccaagagttggcctggctggaagtaatcgggacggtctcggtcccgttcagggtgggaagtcaaggcttgtgtctggctagagtccacaatgaatttcccagcagtgaggtctgcgaacaatccaaggatgatcttaattccaccgtacccagatgcaagccggtcagcaagctctttgtcctggtcggggatggactccgcagatggaagggacttgatgtcggccaagaaaatgtcacagatatcctttaacactttaaggccgttgttcttattgaatgagatgagaactgaagtcaagtagttcggagtgggacgctctgctgagacttcatagagaaggtgcgagaagtgagaaagaatgacaatgagatatgcgaaccggtgcttggtgctgtcactcgaattggcaggctcgaaccgcagttggcgaagaataccttcagcaatggcgtctgagaccagcatagcattcgccttctgtttctgaagcggatctgttcgtctcttgccgataataccgagtccgaggttgtgcaagaaaccggtaatcgaggtaggcagagcgcttagaatataccgaagcgtacgcgcgttcttgaaagcaggacactgttcatcaacttcggtgtcgtcttctctcgagccctggcccggctgagccggagcagtctctggtgcaccagtgctctcctgctgaggttcggcgccagacgttgctgaaggctcggtggggttcccagtaacgggagaagcctttgactttccagagccatgcttttcagcagaggcctgtgtagctttcagccacttctcagggatgttcttctctagcaaaattccttcccacacgcaagaagcaagaaggttgctcaacgaggagatcagggaacaatagtggtccgtaaggttggcttggccaaatatggaggtaggttgaccagcgcgagtttgatacagcggcgacgcgaaaacctcgcgtaggacatcggtgaggagaagaacggcattcaagtgtctcacgaagaatgtaccagatttagcagcagccgtaggctcaagagccggttttttggagtctgctggtttaatcaattctgtgaaaaatccggacccagtgggtgcagtccaaaaggccgaaaggttgtccactgctgcctgtgcgcgccgaaggagagacgggagcacaaggtgcggcttcgtttctgcgagcatgtgaatgagcacggtgatctcctggttggcgttgctgctgtggaaatcaaatgccaagctttggagtgtagcaagatccaacaagaactctgtaccgccggccaggataaaggatgtgcagttcgtctggttctcgaagaaagcgcccaggaatcgcaaagccgggaacaggtagtccgtagccgagagaccatgggcatccttctctttgggctcgaagtcggggcccggcgaaggaagaacatggtcgagatgcccaacgacaagcttagcgccgttaggaagagtgtccgcgttgagctggggagcaccaaacgaggcggggtcgtctgtgggagtatcaacggctgcaccgatctctcggaacaatgaaaagacatctcctaaaagagttggtttgccgtccgcatcttgagtccacatctttgtgcccatacccaactcccatgccttgactcgcccaagaatgttgacacgagtagccattacgagaacggcagacataatagaggtcttcaatgccgggtggtgtcggacaagctcatcaaaggtcgtgcctaaggaacgaacaagttctgggtcatccttcaggcatttgacatgctcagggttctcaaagatctcgaagaagctgtccagtgcgtcggaggactggaagaggtccaaaccggaggaattcaagcagatggcaccaaatgcaccagggatacaagcaagagcatcggctgcgggcattatgccaggcgcaagaggggtgccctggggtctgacgataggatactcgcgatctttctgcttttcctcagactggacagcagcttcagcgctgggaggttgagtggccgcgggttcgccctcagtctcgggctcggtctcgcggtcttccggctcaacggctggcggcttctccagcacgtgaagttcacggcccatgacggcggaaagaaggctcttgctgaggccagcctcggcaatgacagcataactagtaggctcgttgtgaatgaagctgctgagaatgttgacagcattgctccaaacatgtgagccgaacactcgagcattctcgaatacaaggcgaagagaagtcaacagctgaggcgaatcaatcaagtttcgtagaacacgatcgaagcctccgccattgtgctgcatgatgtgattgacgaaacggaacatccagcgcagggtctgctgttgaaagtaaggaatctgatagtcaatcgaagggttcttgtattgagcagggaatccatccccgcgattgaccttctcaaacgcggtcttggtctcatggtcaatcagatcagacatggcatcaaaccctcttgccgttgtcagtgtaccgagtgcatcccggaccgcatgcacaaatgtgtcaaggaactccatgatgcgggaatagactcggcgggacttttcagtccgcagattcaaaatatcaacgaacatgggaatcagacctgctgcaaccagggtttccggtgtacgtgtgctcgaacttgggagagtgcgtaagagcgcaagcaaagcatctcgccactcatcgcagtaggcatcatccgggtcgttgttctcagggcctagttcgttgaccattttacgggtcaggaacatgagaattccatggttgacattgacgctcagagctgcgcagacatcaacagcacgagtcttgtgcttggccaacgcatccagtgcctggatcgccaaagtttgaacagaccgggagacctcgaggtcgccactggcaccgagatgaacaacttcagcaagctggtaagcaagttgaagacgcttcggttgttcgaggtcggattgtagaacctttgactggaaggtactctccggctgcacatgggccaggttggttactgccagtgccttgatggaaaggatctgttgtcgcgtggcacgggatgctgtcaacgccttggcgactcggagtttttgaagcaactcatattttgattcaagcggcagatgaggcaagttggccgcaagaagatcttccacttttgcagttgaaacctttgaatagggaagctctaggactttgcctcgcgtggcctcttccaccttgccaccgggaacagctggtgattcatctccgtttgagccctgggtggaatgaggagtgggatgtgtcgcacttcgtcgcaacggggttggtgtggtcggaatgtgcgagccctgctctatttggccaacttcagaggtcgtcctggcctgttctgagcccgagggatagtagagaactcggacatcaccccattcctcccagccatcttcatcacgcacgagggaaaccagttcattggcgttaacttttgtctgggctgtactttctttccctttggccaaaaccgcgggggacgcggcaaatggtgttttactagcgatgactggacgagggaaaggagctgcaatcttctgcaacttttcgaggtcaagagcatagtgggactgcaatacggactgttgatgggtgccacgctggcgagagtgatatcgttgagctaggcaaagagacagccgcaatgtagattgtaggagagagagtgaggtggtattcaataggtcacccaggcgatcgctgctgctgtataggctgcggttcccacatttctcgagcaaaagacgggagaaatcaagaactgcttccacaagctctctatctccttcagggccgtatcctagggcatttagttttgcatcgataccctctgctggctttttgctctcatcggccgagtatgattcctccagaacactgcgggcgaacagctgggtctgagggccagtattcaggaagtatttctccacagctgaggctagaatctcgtcgaatcggtccaggacattgatccaatggtagagatcaccacgtgggaacggccatagcttagggaatgtgctgagaagcgacgggagctctggaacgggaagacttgtggcacgcgctatgaattcttgcaaaaaaggtgactgtgatgaaaggaaaattttttagttgggttgcacatcaggccgccggagagtaacttacgattgtagcctcatgcttttggctagctaccttcttaattctccccatgataacgatcggccgaccagtcaaacatgagggagtttagagattccaggagggttgtctcctagagagggtggtgtgagaaggtcgtaaagaccggtgtcgcggaggaagcgcgaagatgccttatgacgtttttggtgctgctttgctcctcaacgaaaatcgaatcaactcaacgtgatgaacacctgagcaaaagttccactgtcaataaaaagcaagtcaaagagatgcttgatcaaatttaccatccaatcgtgaagaaacttgggtaagaaagctcaactgaagagctgagagagatatcggaagctggtcaaattaagggaaaacgggtgcaggtcgttatccctcaagatttgacgtagagctattaagatggatatgtcaaaaggaaaagatggcacaggaggggttgatagaaaagacgagggaaaaggacgagcaacgtgaagagaagctggtcttgccggcagaaggcagaagggcggagcggctctctgactgattccccgctgggcctcaggcatcgactgtcttttcacttacaatcttcaaatgtcttttaggcaatccgatgcaaccttcaaagttggaaattgttggattttatcttacagagaattacagtggaatatacttgactacattctcccagttatttttgaaggaatgtgggacttcagagtaagagccagctccaattttattgatgcgcggtgagccacatgtctaagaacaacgcatacatgctatacaaacaatcagccctaaggcattgcaaacatctctcaaacaaatttcacatcctctgcagttctcaaatatacagattttactccctcctggcaggcaggtctccgtcccattggattttcatagtcatggggaacggagagaagctactgtgctcggcatccatatacatggcgattcctcccagtccatcaagcctcttcagatggccttgtggcccgggggcacgacggacattatccagtcgcccaaggactttgagcatagtggaaagcgcgagagggcacattttcacgcccaggcattcatggggaccgaagccaaagtgagtgtacaggctcatatcacggtcaaggcggaccttgtcgggatcgggaaaggcaacagggtcgcggcctgcaacaacctatattttgcacgttctattagtatctgggattccgagaggaaaaatgaaaaaggacaccaaataacttaccaagttgcagataatctcctggccagctttcagagtgaccctcttaccgttatcgtcaaccaccgttggcttagtggcaaagcgtggcaacgccaccgagcatcggagtctcgctccttccataaagctgtatccagttagtatggcgctttagatccggacgtggtatgtgaagaaacttactatcgcacaagaagctcatcagcctcaggagtgtcctccctagacaagcgctggatctcggccaaatgctccgccgcttcttcggaaaggtagtagtcgatgcattgggagaaaagctggccttggttggcaaccaatgcaccagctgtgggaagaatgtgcgaccacacaacgtccttaaccggcagctggctgtcaagtaaacgttggatcatgtggataccatattcactcaagatgtcatggcggtgtaggcgattgaccaggttggaaataaacccagtcttagcaactagttcgacgttggctagcgtcaactcgcccagctgctgtgcaacattgcgagcagtctggcaaagttgcagcgacttggacacgtcaacatcgtagaagatagaagcgaagatgactgccaaaatttggtacagttcctgctcgctgaacacgcctcttgggtttgactctgtcttaagagatagggagaagacgtttgcacagaagttaacttgggcaagaacggcaacatcacgaacgatgtcaacctgattgacgccagcaaccttgaaggagtttcgctcgaggagcttcagagtaatgtcctcgtagaaggccttcacttctgattcccacttatcacggtgcagagcagcaccgatcatttttcgagaagctgcgttggctgggagatcacccgacaaggcgaagtctcggccataagggcggccactattctccatcaaaaattggatcttctcgccccacactaccttgaagccttcttggtctttcaagatctttgtgcaagcagagtgggagttgatgaagaggggcggggctttataaaatggtcggtcaaaactataggttttaaccttaccaaggctggtcagaatcttcttattctcatcgggcacaacaagcgggaagtgtgcgtaaaccgagtcgccacggaaatgattggggaaggccttcaggatcagtttgtagaagacttggccaccgtcaacagagacgtcattgttgatctcattgaatgcccagtttgtgagatgcttcggtgtgaagtcgacagtatagaagcgatcgccacgaaccaaggcaactgcatccgagagaatggccctagaggtggtgaaattggtgcatagaccactacccggggtcatagcctgtttggtctcttcgacaacgaggccagggtacaattcgacaaggtcaggatggtcatagaaatgcttaagctggttcgcgacgtatgggtctgggttgatctcctcgaaggtttgataagcagccaaaccaaagtactgacggaattcgttcagggtagccaaattccaagagcgtgcctgcttgatgccgagaacctcgatgcctctgaagacatctggcacattcaaagcaccgaaagctccggcagggtcctcaacactctcttcgaaaatcttgaccaaatcattatcgtcgaactttccatctgcttggcgttgcaatttggcgaaaggacgttcctggggatctgcggggagctttgattcccattggcgaagaccccctgtgaattgctgcatgctaatctccttcggatctttcccgtcaaatatttctttgtacagatcctctgaccacttttcgtccctagacgagacacaagaatgccagcgataaacaagattgaactcggcagatacttggtttccggtagcctgggcaggtgcctcgccaagcaagccatccctgatatcggcacggggatccaaactccacagactgtcagttcggttgacgttgagaatggtccggacatagtccttcagaatgatgttaatataaagaccacaagtaaccagtcttgcggtctggaagaggtcattatcccaggtagcataagcttcggcatttgactcatccggtttcgtgaaacgaccaccttcatttatagctgccaattgagtaacaactgagttgtggaagcggttgaacatgatgagtatgacaccaacgccaggggggaatcccaaaacccgcttggttgagaagcagtcaggcttcaactttccatccttgaatgccctaactgtatcctgttctttctggttgttaccataaagcggagacaagtccaagtacgaggacgtcaatgattttgtttggtccctgggatccgtctggaacaagtctgggatctgttagcctcggttcttcttctgttatcgcagatatctcaaccaatggacaataacctaccgtgaatgataatagaggcaagatggaatagcacgctagaaatcttgttcgggtgttccttgaaatccttcctggccaagagactatcgaaaagagcctccggctccggaagagcaacaggctgcatagtcttcggtcgaacagaccgtgcatatggagtgttagcagcaccgatctgaggccagaaagtgttctagggttgtttagcagagattctcaatccataaggggacgatccatacgtttccagatccatcagctttcctgtatgccgcatcacgtccaagatagctgcatcaagagtcagttactggacatttcccacacataccacattgctttgcatgacttacgagataggcgggtgctccagatcaccccacaactgggtgaggaaggtattggtcagctccttgccatttcgagatgtcgaaggcaagccagaagcaagctgcagaagagttagagtgtgaagatggccaatttctcgcggaaacacaaacctgaatcacgcgctccatgatataatctctgtcattcacagccttaccagtcacagcagttttggccatgtccgccaaggttttggcatctttcaagtcaaaattgagcaggtccttagcaaggccagtcacggttggctcttgtacgtagctgccatcgccagtttgggtgggcaagggccgcaaggcagcagccacaacttgctcgagctgagcaatcttgccgctggagttggactctttctcagccatggcgaaatcagttgatatgatacaatagaataatacagaagaattcaagtgcgaactgcgaataatatgttagctccaatgtcatatataccagtggagtagtattctgcgactaagggttctggaaaaccttgagccggggctgaacagtgcgaggtagaggatgaacaagaataatggaacgtctagtcgcctaccggtatatgtcaagcacagttaggtagggcgaggtatccaagcaataagatagacaacctaggaacccccgtatataggaaagcagcaaaagagcacaacaatcacaaggtggttagggaaagaagaagtgaatcatcatgcgatcatttcggcggaaatgggataggatattattataagcctcccatgggaataatcacggagtaagccgagggccatcagccgagcaaagcgtacggctgaatgcacattctgctagtccagccgcgcccccatatattgaccattctcagcgcaaggtggacctgagtgaacaggaacgccccactggctgctatgagcaatcagatatctctgattcgtgcgtgctatacggggtagcccctgtcaaatcaagtcttacagcattttggcttactgagtagccacttatcagatggctagcggataacccggaatacgacctgggtaaactgatagacatgagctatattagcatactcaaatggttcaattaagtagtttcgcaagatgtggtcaaatggcacactatgattggagaaatgacagcggctgaatggatccaacgatctgcaagataatgttttcgagagatagtacagagtacggagtaataccgatggacttggaggggtttgttttggttgattggcgatactgttcggccaaactaaccatgtaaatgggagctgagacccccggggcgatataatttgattctgatttgacgttaccattttgacgggtacagtagcttgtttttctcagctcccacacaacccgacactgcctaacaacttttctgccccgctatcgtgcatatttgggcctcgttagctcccgaggacgggtcgtttcagctgacagcccagatgacttgggagacgacggagtaaatatataacctttgttgtcccagtaaattatagcatttaatatggtccatgaggatatactgcagttaacggaatgtgccattggcgggccagtccactttccagtgaagaagacaaacgtcatccggggcaacaggcatagcctcgccaaggcgcactgattgtagtacttcttacgaacccccggttctcagtaagctgccaaggcaggttgccttgggaggccatctcaggaaaggcatgggtgagcgctcaccagaaaattgaaatactaactaggcgttgggactttggcctcaggtgtcaacacgtgatgccaaccgaggcccgacctcaggcagccctgtttttcagccaagtcgcgatttcaagttctcttagtggtcctaaataaagctccatcgtttaagcatcatatctgctggagctaatttatcatcatggcggctgataaaatcacgctcgtcgttcagccaaggggtatgcattcatagctcttgtttacctaaagctctcagtaagaccagggagcaaagaaaagcattgctaatctaaaagcaggcaaacccatccggaagcttcccaaggaaattgagatccctctcaatgcctccagtgaagaattgcatactgcactctccgcagcatccggttgctcaacccaccggatgagaatcaccaagggtagcgatcacagcgtagtcccgaactcgatcaacacgacaatcgaggacactggcatgcgcaattcaagcgtgatctacgtcaaggatctcggtgcgtggctataccccatatcatggacaatgcaactccaacccctatcagcgcactattcccaacaaaatctaacatatacttcttcaacccaacaggaccccaaattgcctggcgtaccgtcttcatcatcgaatacctcggcccactcctgatccccgcgctcttcctcttcccactccgacccttcctgtacttcacctacgataagcccctcccctccccctcagacctccagctcctagtctgcgcgctgctgagcgtgcacttcctgaagcgcgagttcgagacaatctttgtgcaccgtttcagcagcgccaccatgcctgcccgcaacatcttcaagaacagcgcccactactggattctggccggtttcaatatcgcctactgggtattccacccagacgcggctgccgcctcgagtaaccccagtcagactcttgtgtatgccggactggcgctgtttgtcttcggtgagctggcgaacctgaatgcgcactacattctgcgtaatctccgccgccctggtaccaccgagcgaggcattccgtctggattcggtttcaccgtcgttacctgccccaactacttctttgagatcctggcttggttgggtgttttcctcgtcagccagttgaactggagtgtgctgttgttcattcttgttggtgggttgcagatgtggagctgggcttggaagaaggagaaacgctaccgcaaggagtttggtgacaagtataagaagaagcgcgctgtcatcttccctggccttgcctaagaagttaccggagtggtgaagtctaggctggtattggcgaacccatatgctatggcgatgggctaaatgattgagtgagtggagaagaggaagaaaaccgatatgccttgcttgtcggctcgaaacaggtccaagcagcttatcgatcaaccctagttgttatgataagcggtattcgctaaactgatatcatgaggcgatgtattatattggtattagacataataaaagtgaatgattaccgtgttccttttgcagctatgcataccaattgaaagcaaaaatatgccatatgttgaggtctccacgaccacacgccgaccacccctagaacattgtatctgtgaacaggtggaaaatcccaagcaaaacgccgactccccgtagaaacagtggactcctagatgcaagccacttcagaaaacatttaatcgctctgtgtcttcttctcccattgcttatagtatggctctagttcgcgggcacagtcccggccctctgcatcatcgcatccatggaattggataacgaggtcaccatccttgtacgtgccatccaaagaagcacccggagagtcactgctatatgagcttagaatgcgctgagggactaaggcggttcgagcaaggacagttgggtgccactgcatgatgtgatcctagcagaaattcggttaggaccaaggctcagaagctctatctataaagatagagcaatattgtaaaagacttgtcttaccagtccatgggtctccgccttagcaaagttgtagttgcggtaaagcgggtcaaaccaaacgtccaggaagaaacgggcaaactctccattcttcaagataaagccccccgggtttaaatcttcgctgtcttgggtgatgataaggtcgacgtccgcttcctgttggtgcgcaaacgtcttgatgatactatctggcgggacaacgggcacatccttcaacattaagtcttcaaggcggcccttctccagaatgtgagacttgagtgatttagtaggattcatgatcagagcattaggggcgagatagaagaaatacgccgagcgagtatgtgtagccatggcatgacgggtggccggtgcgacggcccagctcatcggggcatcgccaacgacttcgtcgtaatccgacacgcttgcgaaaaagttggtatagcctgttcccatgtgagggttagatcgagttcattacgacggaagctcttccgcactgcttcatagaggggttattaccatgacgcttggcataatcctcccggtttgcgacgatctttttgagatagttctcgctgtaccgttgacggtctagcagtgtgatgattaccacaccagaagtactcgccggagcaacaacggacgtagaagatgaggagtagaggtagtggaggagataaataatggataatactgcgaatgcaaggacagcgaccgactttaattgtttcctgcgataggatggcattcgagaggaacgggagagaggtagaggatgcgggctccgccgcggaggtagcgcgaactgcatgaaggcgtgtgtttgtccctatgttttatgcaataaggacagtgcttctgtttcaatcaaatcatagtaagaaagatggcaaagtccaagggtatcgaagaaagagacttgaagatcgacgcgggtgcgaagatcccgagacatgtggcgtccgaatgcggtccaccttctcgccgcattccaactccccttcagggtcccgcatccagttgggaatttataattaggacattgcaaataaccagagataacatatctattacttacctaggtaccgattagctcaaatagatttcattaggcaagagttatcaaagaaaacgagagggctgatatatatagatccgccctgtctactagtactatgaatacatctgaacacaactacctcctttggccctttcttatttttattttcaaatactaatgcttaggtatgctaaatagaaatatatgtcctaaagatgatacatatactagtatcttgctgactcttctgtacatattcaaaagacctctcagccttatgagggttaattggctccctagaacggaggagggttcaagtccaagccgtcaaccgtcaaccggaatgcatccctggaataacttccggcaacatccatgtcaagtcgacctcgctcgcaatcctccaagtcaatctcagaaatcacaagcccactttcgatgctagagccatcagctgcatcgtcagtggagacttcccagataggttcagccacgacttcccccatcggtccgacaatgcaggagccaccacgtgatatatagcggtctggagcttctaagagatcatgagtcattcgaagaactaagtagaacaaacttgggataacccagacaaccacgtaccttcagtagttttaccttgctcggtgatccaggacggcagttcattgtagcgcacgcactgattgcaggtaagcacgaaagtgcggccttcaaagccaacagtacgcatgagaggcaaccaagtgtcgcggccgtcggctgttggtgcgaggtagatgttcacattctgcgaataaagactttgacgaagcaaaggcataaagctttcccaacagatagcggcggcaatagtaagcttcactccattgagctccgtagtgatagctttcagggtagaaggagagccctgagcccatacaagacgttcagagccagtctttttcaacaattccaggtcagcattagtctgtatcttccaatcccgctgcattcgacagcaagtcaaatcgattacgattggtagcaaaaatcaatggccatgtacttactggcataacctttcgtcttttccccagaacaccccgcaatggatcgacatacagcgcggagcagtacaagctccccccggccttttcaatcaacccagttgcaataaagacacccgtctcgcgggacacccgctcgaggaactctcttgtcccgtcaccacggtggtctcgaccttgagccacgggcagcttacgctccacccagtcatctcctgctccagcaggcgtatcgccgaggtcaacggcagcacggaagtattcaagaaattgatcccggccatggggggcacgggcgccaacagcagttccaaaatcacaagtgcgaggatacccgcctagataagcttctgggaaaagcagaaggtgtacaccctttgaagctgcatgctgggtggtctgcttgagagacgcgagggtcaactcaagtgtagacagagtgcgggcttgcgccacagcaacggtgattttctggggcattatagggtactcctgtagtgaaatatttgaagagcaaagtttgaaaagagtcagaataaatagttacccctctcagcttctgagtcaattcggactcttttcggaggctgtaatgtccgccggaccttggcatgccgatgagcttgcactgcaatttcaccaatagtttgaacttaaccttgaatctaatcagtctgctatctctataaacatactaaaatgaagccaacgatcaaataatcaagtctttcagcctccgtcctttggcaaatgtccagtcacgtggatagatggagccgaaaaggaaccgtcatcggactaagatgtccgatgaacctactgagccgctagatgccgagtccgaatggaaagaaacaaagtagcaccatctaggaagaggcaaaaagcattggcttgccgacggtgtcgattacggaaacaaaaggtgagagtactggattacagccttgaaccgcagacagactaaccaaagccagtgtacgggaagcaggccgtgtgataattgcacagcagcaaatacgggtaagtatataatgacccaaacaacaagacaatctcatctgattgtatatagaatgtatctcaagtgagccggtgagccgaaaggctcgtgtcagtaccgagtaggtcgagtcaaccatgccacaggtgtcctgctaactgcctttatagatacacccgagctcttgaagaaagaattgtgaacctcgagtcacaaattccagataagaggtcagagaatctctctgccagccagcaagcacctacgcaggaatctccatatcaaaggggcaatgaaacggaccatgtttctcaggcttctcttgcgtcaaggtcaccataccctcacagtatgcctcgtgccggggcgtcatcggatactgccactctacgatcttcagccacaggcgcatcattagatttacctttcccccatgtggtggagggcctaccggatactcatggccaatgtggacattccagcttgttgattggtatactagctactctcacaggcactgagacctccggatttctccaaacacagtctgaaggtccaattgccaccattttctctcaattcacaaaacaagtatcacaagcggatcgtgtcccactgttttcaaatgagacatctgatcgtttggttcaaatatatttggaacgagttaacccacgatatccctttcttcatctggctacttttcttggctggtatgaatcttggaagtctcgttcgcagatggacagggccagacatcagcagtctctatggaaggactattttgtgattatggtatggataaaatactcattaattcgaatttatattaaccttcgatacattgtaggtgcatgctgttgccctacttctaacacctcgtgtctctgtcgaagacattgctacttctcaagtaagtgcatatcaaatatccaaggctacgaaggaaatctaacaacttagtccttgtataacagtgccatgcaatatcttgcccatgttttcgcacaacccgattctgtcctacatgcacaggcatatctcctcctgactctgcatgcacttcactctccatcctcacagatgattgtcacaattgtctctgcaatgatgagatactgtgtcatggcccaacttcatttagcggagagcgagccgcaggtgccgaatcccgcgttttccttagaggtccaaacccgccgtcgagtgttttggtctgcttatgctttagatcgatttgtcagttggatttaccacatccccaacaatataaacgatgaacacattagcgtggaggtaagtcatttcccaataacctgacctcaggatctgtacctgaaaataacattgaacacactgacaatggtagcttttttcaaacgtcggagacgcggaccttcaccaccaagggtcagaggatagccgcattcgaatagaaacaccatcgcagaaaacacatgtctcaccagctcttcacctattccggtgcagacgtatacaatcccggatcatcagcaccatgatgcggtctgatttcaaagaaatcgacgcctcaatgatatggcgagaacacatgttgggtgaattggactcctggaggtctcaattacggctattgagcgatgtcgcctccaaaagctacacgagcgatcgatgggttggcatggcttacaactacacgatcctcctgttacaccaaccaaccaaagcaaacgtctgcaatggctttggtgaccggtcagtcccagcctgtgttcagattgctatgacatttaggactttccagaaggaccgacagacagcacaattatggcctggggtatgtgctggtatccctctattcttttccccatcaactgactcagtctggtgatcagctcttgagccaagtcgccgtaggtatcacccttctatactgcttctgggcgactccacctcaatatcaaaccgtcgcctaccgatcacgagaagtcccggacgcattacgcgcgtgctcaactgcactggccatcctggccgagcgatgggttcaggctgaacctttgcgtgatgtcttcgatgttctagccaaagaagttccactctacggaatgacagaggaagacccgccaccgaggcgcatatcggcggagtctgcttcctacattcaatcccagatgcctttgctcacatcgatcatcatgcatcggggtgtcctgcgcatgatacgcgagatgatcacggaagatttcccgagcctaaatgaggaatcccaccaccaactgcgggcatcggatgaccaaactatgcttgggagtttaggtggtcacgcgtgctccgaagagtgtccgtttttccgtgaaccagctcatcctgaatcgatggctggagtggatgcccaggcctttcctccacttgaaaacggaattggcggtgcctatggcggtgcctatggcgttgacgacgacatgctcatgtttccgcccctctttggcttgggggaatactgatttcggtggagtgctatactctctttatacttacttgtgatagacatggcataaaaatgatcagatgaaacgtcttgataagtgaacatgaagtaagattggagtataatacacagaagacccaatatgcaaatttaaaaagagaccgcacccaaattagaaagccgtgaccatcatttccgccaggagagtcgagatagcgtacaaagatggcacaaaccccatggtgcacacaaaaccgtccatcgctcttcaggatagtgatacaagcgcctgccaattccctcagcactcaagttcgcccaagctgctctaccgagtaggcaacttggtgccttgccgagatttgcgaggcttggtcattgcatcaatgtccaggttttcgattttgtccctgatttccattttgtggtccctcaaccattcgctcaatgacgggggttcagggacaccgaaagccttgcgttgctttgaaaatttctccttgatcgccggagtctgcataatctggtgtcgaaggttccagccgaaaggaccgagctccttgaggcgcgttggccgatcagacagcaaatagttgtctaggcccttggccttgtagattgaccgcaaggcgcgacgagtgaccttgatatacaccgactcgcccaaagccttactctcgatcttctttcggcgtacgttgggcttccagcttcgtcgtgtcttgccttcgttgcgtcccttggagatcttgttgccgaaccggatcgaagcacctccgtacaggccggagtcagcctgcttgtaccactgtgatggtccgtaggggtagactggagcggtttccggtagtttcggaaccgattgcgttgccggcgtcgttgagaaggaccgctttggtgtggcgatggaaagactgcggaaggccgaggccaaagagaagggggcggccattgcggaccttgcttgtaggcctgccattgtgtttgacaggtatcggaccctcgcagaatgtcgagaatgcaaagagtcggaaggtcgttaattgacaacgggcggagaggtccaacagggaagaatttggggcagctcaccgccctggggtcggcgttctcattcgacgatcccttgctcgcgaatttcggccagaagcatatctcacagagaaccatcgcgtttcctttcttttctatctacgctgttcctttgaagctttgatttatttttactcccttcttctcaactgatcgtcttatctttcgttaatacctgtggctctactcggccacacctatctcaaacatggtccagatcagtgaagtaaagggtaactcgcgcgagaacaggaccgcagcgcatacacacattcggggtctaggcttgcgctctgatgggactccggagaacaatgcggatggatttgtgggacaaggagctgcccgtgaggtgagtggatatcaatgctgcatccaccagggtatctggttcacagtaacgaataactaacgattcaaaccatgggcaggcatgcggtgtcgtggtggacttgattaagtcaaagaagatggctggacgggctgtgcttcttgctggtggccctggtactggaaagactgctctagctcttgccgtatcgcaggagctgggaaccaaggttcctttctgcccgattgttggcagcgaaatctattccgcagaggtcaagaagaccgaggcattgatggagaacttccggagagctattggtatgcaatgcgacattaggagaagcccaacaagggtggaaattcaagctaacctgtgacaggcctccgtgttcgcgaaacaaaggaagtttacgagggagaggttacagagcttacccccgaggaggctgagaacccactgggcggatacgggcgcacaattagccatctgatcatcgggttgaagtccgctaagggctccaagaagctgcgcctggaccccagcatctacgaagccatccagaaggagcgtgtcacagtcggagacgttatctacattgaagcaaacaccggctcatgcaagcgagtcgggcgatccgatgcctatgcgaccgaattcgatctcgaggctgaggagtatgtgcctgtccccaagggcgaggttcacaagaagaaggaaattgtccaggatgtgacccttcacgacctggatatggccaatgcccgaccccaaggcggacaagacgtgatgagtatgatgggtcagctgatgaagcccaagaagacggaaatcacggacaaattgcgtcaggaaatcaacaaggttgtcaaccgatacattgatcagggtgtcgcggagttggtccctggtgttctcttcatcgatgaggtacgtggaggagtctaacctgtagattattggatcatgtctctaatcccgcttcttctctaggtgcacatgcttgacattgagtgcttcacatatctgaaccgtgcccttgaatcaaccatctccccgattgtcatccttgcctccaaccgcggtcacacagtcattcgcggtactcacgaaatcagcgccgcacatggtatcccccgtgatctgcttgcccgccttcttatcatccccaccaacccctactctcccgaggagatcaagactatcatccggttgcgcgccaagattgaaggtctcaatatcgcagaacctgccttgaacaaggtctcggagcatggcagtaaggtcagcttgcggtatgccctgcagctgttggcccccgcaagcattctctcgcgtgtcaatggccgccccggcgcaattgaggaggccgatattgctgagtgcgaggatctcttcctggatgccaagcgcagcgcaatcattgtggatcaagatagcaagaatttcctgtcataaatggctacgagtgagagagttccatgatcttgtataccaaaggggtatcttggatgtttattgaaaaggcgaatcgttttgtgtgggcctggtgttacgctaatgctatgtattaaattctatttccaaattattgcaacttccagaagataaaatggttgtagatccaaaatagagtgtaaagagtgtaaagagtgtatagatgtcatctgcccgtcgcaaatgcaaccccgaggcttagatgaatcacgtgtgtctcaccgtcactcgttcctgttccaacgtttgcgaatcctagcaccgttggttattacaactgttttctctttgtgttccctagtacttcgggaaagccagttcacatcgatcgcaaagtgaagccaccctaacaagagccgttgaccgaaccgccactcagcactattgaacagcgtcacccgccccagataaagtggagcctatatcaacacatcaaccattacagacagcagatcttcacttcccttaagccggtacacatatcatacaatcaccatgtcaaacccactagacacagacgccggctcggagatgttcgccagctacgagaacgagttgaagctggtgcaagccgatctgaaccagaagctggaccagatcgccgaggcaagcggcgagcaacggaaatcagcaatcagccacgcaacacaagtcctcgaagaagcgacagaactggtgagtccagcgaacccctaaggctttctcatgtgccacaatgcgagaacaacggacagctgcaagaacaagaaaaactaacccaatcaatccccatctagctcgaccaaatgcgcatggagaagcaaaacatcccctcagcaacccggtcaaaagtcaatatccgcttccgcaactactcaaccgacatcgacgaggtcaagcgcaagctaaagtccctctcagatgaccggcaagcactcttcggcgaccggtacaccgacgagccgcaggatgagcacttggaacaaagacagcagttactttctggtacggaccggctagagcgcagctcagcgcggctgcagcagagtcagcgtatggcgctggagacggaggatgttgcccgcggcacgctcggcaccctatatgagcagagggagcagatcacgaatgctcggaataacttgcagcagagtgagggttatgttgatactagtatcaagactttgaggggcatggcccgtaggtactgaccccccttttcgtccggttatggtccagatatagacgtggttgctgacctctcgtgtgctatttaggatggctaccaatcggatgatcactattgctatcattacggttctggttcttttgattttcgctgtcatttacagcaagttccattagcgtttgggtttcgcgctggcgtttgtatactcggtcttatctttcgtgtcctttattttctgctcttacgtctacactagcaaggctattgcctctgtctctctctcagtgtcgcatctttgtcattatgtatgatagcatccggcgagtcatgatacagctagaccaagtctctggtgcaagcaatccctgtctctaatacgacggttaaccgcccaaagtcccaagtctttattgtcaagtaccaaacagcttcaattgggggtatcttataacgccaaataacaaaagagagaaagacatatctcaacaccctagttcataatcctcatcgccccaaaaacagcattaacaataacacctacacagacagcaacccctttcctccaactccaaaccccctcctccctacgcaaccacatcgcgcaaccaacaggccaaaagaaccccataacagccccccaaagcatatcatcaatcgccccgcgcgatccagacccaattccgccctcatcatccccaaccccagccccaccaagaccaccctgagcctgcgccgccgtcgacccctcatccatccagcggtcctcaagatcccgcagctggtccccagtaggcatagtatccggcgtgcgggaaacggactgcatagctaggaactgggatcgcagagcggtgacctcagccgctgtgaagcccgccaaaaggagacggtcgaagccgcggggtgcgggtgtggtggtagttggctgaggctgggtttgggggtggctcggttgcgcagatgttggaagtagagatgagacatccttagcgggagatttcctgtctacattggctttctgttgcttctgctgtaggagaactgttgttgacatgcttgcttcgttggctaggtcggactcggggagtgcgatgtcgccgatcgagcagtggatgtagaggcgtgggcgggtatcgcgtaccgcctgcttgccttttccattgtcgtctgatgtctctggttcgtctgctgttgggcgagggctccgggttggtgatggcgggagctttagtgaggctgttaatgcggttgtgtcttcgagaccgcggccggcgtagattaggcgtagtcggtgggatgatagggggtttgggagttcggctcggattagttgctttaggccggcgcctgttgtggtctcgggctctgcgacgtctagttggaggtcggggattgaggcggagaagcggacgacgatgaggagcgggtcggtgtctggttcgcctgcggcgtatggagaaaggaagggtgaggccatgttttaggaggaggtaatattgtgcttttatgtgaaatggattgaggtcgctctatacaagcaatatgttcaagttggccaacttagatgtggcgcttaccccatcctggagcctcggaccatatcccgtcaggtgacacattctagacaacggcacggagtcatactatcacttttctacaacacgaagggctatagaaaggaaagaaagaccaaaaatattaaggaagcagttttatggtaaatgtttatgattttttgaggtaagtatgtcacatgtcatcatcaatgtccttcggactaatctatacacaaagatatcacccggttgatcttgcatcaaaagaacgtccccgcagacaaaaagaaaacaatcaacagttcattggttgagcctctaggctgtctcttgacatggcccgccaacttgtgagtcgcaggaacccacagtgaccacaagacgcaatagaaaaatgcagaaagtaagtggataaaggtatcaactggatatcaagcgtatatactcaaacagaagggtagtcgtggaatccccaaaccccctttgaaaacgccgtccgatgcaccgagaagaaagacgccgaaaggtcccgtaaaaaaacatatcaaaaagaatgattaagctgtgtgcttaaaccatgaaagactcgccgcagccacattcttcctctgtaatcatgagtcagtaaaccaagtctgagaagatgctgcacattttgcaggggtcacttactgatattagggttgcggaaaacaaatcgtctgctcagcttatcctcttgccagtccatttcactgccaataatactgaacagagccttgctgtcgatcaagaccttcacgccgtcctgttcgactgtttcatcgaacttccccggtttctctacgtactccaggtgataggcgagacccgagcagccgcggttcttgacaccaactcgaataaacttcggctccggctgtgccatcagtttgcgaagctgctcaacggccaccggggacaatttcatggctgcctttcttgcccgaagtggccgacggggcttcggggaagtcttggaggtggacggagaagcgaaattcggtttcgatttctgcgcttcgctttcccgaaggctcacattggacaatgcgccttgtgatgtgttttgatatgatttcatgtcggaaggagggaattcagctgagatggaagtgtcggcgccgccggtgcttcggggaggcgggaaagaggatggaagcgtgtgaggacggtaggcagttgcggtttgcatgtcccgcttggaggataggtaggcatttccatatgacgagaaagtgcgtagacatcctgccgaaggctttgcccatcggaggagtgtggcggatgatgtcacagaacgttgcatggtggtagagaagctcatggtcgaggagcaatcaatgtgaaatgggagtgagcctcgacgaagatagttattgggtcataggattttgagagaaagatggtggaatggaaggattgattaacaaagtagagaagaagaatctctgactgttttgaggattcccccgtggccccgagttaattacgtaaggcagttgcatgacgcagatgcagccaatcagcgtcaggtaatttctacacaccacacgggcagcaacggcagttgtggcgccattcgagttggtggtttggtaattatagactaatcaagtggattacttggcggatcagctagttttctctttgcctattcaatatataaaaaaatacgcagacatgtacctaggtatgttgtagctcaaatgacaaaccaactcagagaatgatctcaatgtcatccaatgcgtttttcggaagctgagtcatcactgaccgcggagaattccgttcctcggagggaggtgctcacccctcatgaaaatgccacacctccaaatgcagctaagtggcggggaatagtatcaaaatgtagatgggctgcatagatccaccaatttatatacgaatacagtgtatattgaaaattgttccatttttattatcccaacgtgtaaacatattgccaagtgtagaggacatgtggctggatccgctgacaaagtggctggtgtccctttttcttgaacctcgaagcaactgaatcaactcgactctaaatcaaccttactcttttggtttccgaggtccgatgctggcgatctaaccgttgtagatcatcctgtctgataccatggacgcctcaccccttacccagcagagtagaccagagtccttcaaacctaagattgtccagctctatgagaatctcttcacagtacgaacataaacatagctttatgtgatattgctaacatactccttataggcaacggatgatgcagagccctcagagggcttttggagagaactcttcttgctacctccagaccggaaccaactccatgctattctggacaatttgagcccagacgatacaatcggtctacaggtaagccatgattcagaaagcgtcccggaaacaaaaaaaaaaaaaaaaaaaaagtaaactcaaacagctgatgcaataactagatccaaactcggcgtttctttgtccgtgccattcgcgaggcagcagctggggccgcgccggcggattcctatgcactagatgtaagaactcatggtcagtatccggagcataccccctaacctcgtttctcagaccttgactgttttcttgacgagtattctgagcaagaaatacacaaacccaagttcggatgtcattactgttcttgcaggactcgacgaagtggaccatgtcattcctgacttcgtggccgtcttggacagaattattcgcaatggcagtagctgtaagacttccatctgttctgtccttgtttgaggctatggcagtcgatcctaacccttttctttctagttgatgtgcgactcaaggctatcaagacggctattgctatgaccagcggagcatacaagactagcctggtctcctatcttacacacagggacctttttccatcgcttatgaaggtttgatttactcatgttggttctattcatgaaaggaactgacagttgccaatagtatgtttctgattccgatactccgctgcaagtgttcgacccattcctccttctgggattattggcaaactacaataagtttgaattccaaaatccctaccagcttcgacttgatgattttgtgaatgagtccagtatcgaaaaagttgccaagggtgttgggctggcctgtaatcgcctgcgaaacggctacattgctgtccaggatgatattcccgagggctggagcttgaccaacacattgattttctttggactacgagcgctcgctcctggcgccagggacaaagcgaaccctccttcggcggaagaagctaaggccatgttcgctgatctgtaagttacttgcgcggagaatccattgatttgaaacttacaatcctggcagtccggcacaagaagccgcaatcctaatggcgacatacgacttcacaaacgccaataagctctttggttatcatttggttcatctgggagcagaaaacggggaagaacctcctttctcgagcttcctctcattgtcctcctatcttctccaacatgcatatcgatccccgcgggtcgggcactatgccgaactaaacctgtttacgcttcgcattctggtcgaagacccgaccatctgcaagcaaatttgcagcgaagatgtcaagcgaaaggtccgcatctgtcgacagagacagccctacctccctctagtcagcggagaccgggtcctcgcaaccgtcatcttcgatatcgctatcgatactataacacataaccttcgccggcgcctcgacgtcaacatctacaggtatgaaacaacctttcaatgtattcattagccatgggccataactaacaatcctcccagccacacaatcgcaatcaccctccgcctcctaacatatctctcaaaaaacaagatccgcctcacgtaccactggtccgagctctggcggacactactctccctcatgcgcttcctaacaacctacgcctccgatctaaccagcaaccccaagatccaaaccctcacgacctccctcgcagatctaatcgcattctgcgtctcaggcggcgacaccttcctcccagacccagcctcttacgacgatctcttctacaagctcgtcgaaaccggccccatcatctccaagttccgcgatgcatactcattgtcccgctccggtaacgtagcaggcgcctcaacctcttccaaggcagccgatgcaatctcccaaagcaacgaggtgacttcggcagccatcgacactctccaatccgtgtctacgcacttctacaccctcctcttccattccgagggtgtggataccgctgctgctactgttgctagtcctaaagctgatgagcctgtgccggtggcgttgccgtcgataaggaagaagaatctctccccgcgtgaggtccaccgtatcattaagcagggctatgatacgctgagtatccagccgcctgagggtttgagtgcttggactaagtggcgtgaggcggattggaagagtgaattgaagcgtgcggcgcggtgtgctgttgatgatgctaggcaactggttgcttaggtgtcgggtttgtggttctttctttttctaggttatggatctgtgatcttgatctggattcaagatggttgggcggctgtggagagttagttcactatgtagtggtgctgtcattaacttctctatgaagatatccaattaagaatttatacttctcctgtttcagtgttaagtcagtattgccttgcttcaatgataactaccaagtaatatcataaagatttcagattttgatctctcaactcccagtacatcgtgactttgcaatcccacgaaaccttgaaatattctacgccttgaagattacatatgtaagatatagccaaacaacgtatcttgtattccgggcccccgcttcacgaatcgaaattttaaaaaaaactaaaaaaaaccggttgctgctgaaggggtggccacccccaccccaacgcacgcaacaaaagaaacagcaacccttcctcccccctcccctcccccaaaagaaaagcctcttctcgcactcagtgagtgctctccgccggcaggtagctggtggcgaagtacttctccgagttcttgctcagccacatggagagcttggagatctcctctcgcaggcggttggtggcctgcatatccatgttagtctgagcaatcagctcaggcatggtgcctatacaaacgcaagattagcacggtcctcaactctcacaactgaaccagaagtaaggtgaagcggaacgggatacatactgaacaagcggatcaggtgctccgctccgtagacatcgatggggcccttatcggccaggtccccggtggcagcctcgaacttcttacgcaacccacggtactgggggcgctcgtggcggtagagaagaatcttgtccagacacttgtcgaagtactcctggatcccggcaaccacttcctccaacacgtcctcatcggcagacgagcccgcccgctttggaagttcttcctcgtgccagtcatgcaggatccggcggactgggtacttcgccggcagagagatgacgcactggttcttggtgacctgctcccagtcatcgacaagtagggacttcaggttgtctggcataatgatgcggacggaggggcggaggttgaagctctcctcctgttgcagattgttagtatgtgatcataaatgttatagttcctttgtaatattttttttcttggtattggttccattgaaccaatatttagtaggttgaggtggtaatcgtataccttttcgatttcactatcacgggctcgcttggtgccacggccgggcacggagccgcgctcctcgctgtcccgcacagagtcacggtcggaaccggcacgcttcttagcagtggtcttggtgttcttcagacggaaagaagcttcagcttcgcgacgcaaattgttggccaattcgcggttgtcttcagtgagcttgcgaagacggtcctccaggacccagtcatcccagctggtcgaatgttagcaaattgtctcatgaatccgaatgatcttggacatattgattctcaaaagcaagtgcagtaagaaatagaaaacaagcggcattttttgcataacataagagtgcatagatcaaggtcaagtcttccgtataatggcccggacaaacttcccaagagtggaggggagcaatctcaacatcgcagccaggatgtagatggacaggggaagaaataaaacaagccagacttacgtattcttccagcccttgtagtggacctggtattcaaaggggctcttcttgtcattgggatccttgtggcgaacatccaggatcttggcatcgtaaaggatctcatggtggaagcaaaggaccttctcgtccttgctatacatagaaagaggggccatttttgtcggagaagggtgaaagatgtgcgtgtagaagttggtatgacaggttgggaacctccaagctcaaaggcgtagagatgttaagatgttccctatcttgcgggaaaagggtgtgatacaggcggtaacagccacgatcagagagatcttcgaagccttcagagactccaatagattgtaagactgcaaatggatcttgcagacttgagcaaagacaagagaggaagatgcacaaatggcaatacaagatgctttttttttggacagcaaatttgattcagcaaaggttgtaagaagggaacaagattagatcagacgagagaccagctcaaggaatagaaggaatcaagtttagaagagagaggttgagggtgtcgatgttcgatgtagatgtagatgaagtcgagtggaagaagaaggaaaacaagcgaagatgggccaaatgggccccttggaagaaattaggcgcggcagcttattgtcacctctttgacattgacaactaattcatacaattattcttcttacaataagaaattgatttccattcttctattcacctttttctttttctatattctttgttcacgtgaagaatattgtcaacttcggttcgcgacaaacggagtctccaagaaaaagggaaaacatactctgcatctctgcatctctgcatatcttcatactctacactacgtactacatctacattcatcatgcctccctccgaggagtccatcctaagcaatttcctgctctctccagccccgctaccgacagtcatgtcgctgcaaaagttcacagagctcttcccaaaacgcttgagagcccatccacacatcagaactatgtatcgggagttacaacagatccgagaacaagacatggaccgagtcaatgaaagcatcgacaatgagatcaagcaaggtgaaaagcagagagcagagctccgaaaagctatcacagccacgggagtcgagtccaattctgaagagcagcgtgagatagacatggatcttcatctgttcggccaaccacctactgctgcaccgggaaattatcactcggtggctagtctcctggctgaaatggagacggctaccactaatatcgagcatgaaattgctggtattgatcaagaggctgcgaagattctggctcatctcaatacgactattggggatatgagcgatctccgttacggcaaattacagggtccagctgggactgctgaagatatggccagtgaggccatcaagggcctgcagaaccttgaagatgtttgctataagagtagcacttcttgagatgggtttgactcattatgcatgtacattgtgcactgtgcccatatgttatttgcaattgaataaatacccctgaactactccgtattggtacgtggtttcaatgttggcaaaagtccctaactgacctattgacctccagatacaaagcataatatcacaggcgctttggtatctgaatccgctttcgagagttgcctgggaattcacgcatccagttctaataatcttgaacgctgggtcgtcgccgctctctgccttcagagctatgttgtagggattcaagacaactgccctttgcgacacgaaaattgttcccttgggaaagccatctattacactcttatgatacaagtctgaacctgatggccttggatgcttctattacgccaaaactaagtagcaaatctacatcattgttacctctacaatgcattaactcactggagttggattcttggatggatttggaccaaatattgactattttcctaagatagaaacacagtggacaattgagaatccatgtatctaaagtcatgtacatactcttaaccccatcaattttgcaaataataataaccataaccataacaaaatgtatgtgctaaatccaatgcccaattctcgcgataagaagtgtggggaaatagtcaaacgcgtcccgcgttcgcgttttcctccttcaactccaatccaacagcacttgggactccctagctacatcatgccctccataaagctgcgaccacactgctcaagcccggtaaaggcgacagcaaccgcctcaaccccgaacaatccccttccaacactccttcaaacaccctcgggtctggcccttctggagctccagggcacaatcaatgtcccctcagggaacgaagaggatgatatagactactcctctatggacaacccggcctccaccttcgaaactccgatcggaaagctcatgttcccagactactcggtccacaacccagacgacgaaaaatggatgaagcgcgcttatatgtatattggccggtaccagcggatgactggcgaagttaagaaactgccacggccgattgccgtgctacgaaaatgccaggcatcggaggatgaggaactggaggttgtggagattgtgcgctataaaatcttctttaagagtcggccggagcccgtgaccaatgtttgattgggctgggttggaggttttactttcttgcattggaatgggataaattggcgagatggggtcttctggagatggcatccattgtttacaatgtaaactggagccgcaggacttggatgaaaggttacatgcatggcccaactgaacatgtcttcgcgctttgctacggagaacagcggcttctctctacagcattgaccctccttggtgcgcgaaaacatcaattcggcttctgcgggtatacaggcctgaattcgaacctaccaaggttcaccaaagaaggacaaagctctgtttccccataaggccaacagcccgcacagacagcagaaggaattgtcatgaatggatgacttcagcattgcctcatacgtttatcttagatagccatctctctctattccaagcttgatccggagatgcgggcttggaatgtgacacgtctgggcagggatcccctcaccagcattctattttctcctcaatcccgacccagctgtcttcaaaatcactcataaataacttgaccgcaacttataccggcgccaagggctgccggagggatgacatgcttctcacttcacacctacaccgataccagcgcagccacaatcaacagcaccagccatgaccgtccccgaaaatgaagatatctttcccgcgaagctgggccccgagtatgtcggcttcgatcacatccattggtacgtcggcaatcccaaacaagccgcttcgtactggattactcgcatgggcttccgccccattgcataccgcggcccggaaaccggctcgccctatcttgtgagctatgttgtagccaacagtggcgctactttcgtccttacggggccagtttgtggtccaccgaacgaaggctcagaagacggtttcttgcgccagatctcgaattatgagcgggcgacgctggctgaaatccatcaacacttgaccctacacggcgacggggtcaaggacgtcgcgttccggatcgcgggcgatatacaagctgtatggaagcgggctgttgcgaacggtgctcgcgctatcgccgagccgcggacgtctgctgtcgagggacatgggttgatcatctccgcaactgttggaacgtacggagataccgtacattctctggtgaaccgcgagcggtattcggcggacgctccattcttgcctgggtatcgattgcttgatagtgaagatccgatcacacaggttctaccgctcatcgagattcttgaaattgatcactgtgttgggaatcagtcgtggggaggtgtggacggcattgtccaatagtgagtagaatcaatgtcgtccatgttggaattgccgctctaacaaatgagctttagttatgaggaatgcctcgacttccatcgctattggaccgtcgacgataaagatatgtgcagcgagtactcagcgatgcgatcaattgtcatcgcttccccaaacgaaaccatcaagatgcctatgaatgaacctgcaacaggcaagaagaagtcgcagattgaggagtatgaaacccgccccttgtcccgctttcttccctcctttcttctctctcatatcttctactccacccacatacaacccttctaaccatcacagattcgtcgactactaccacggcgccggagtccagcacatagccttccgcacgcacgacatcgtggctgccgtaactgggctccaagcgcgcggtgtccagttcctcagtgtaccggctacatactatgccgatctgcggaaacgcctgacacaagtgtcatggacgctcggagccgatgtagatgtgctcgagcggctgaatatcttggttgacttcgacgagcgcggatacctgcttcagatattctccaagcatgttggggataggccaacggtgtttatagaggtcatacagcggaattcgtttgatgggtttggggctgggaatttcaagagtttgttcgaggcgtttgagagggagcaggctctgcgtgggaatctgtgaccatcagcggttcgttttgggatcttggatcttggaccttccatttgctttttctttccaagcgaggatttgatactacggagcatgggatgattgaacacgtatgggagagaaggggaagcacgatgttatatccagtccaaggagtctaatcaatctgctcggcatcagtgaagctaataagttccgagactgatgtcctgtgcttctagtagaccacatagtgagccatacagatatatcttgtgtagtccattctatagcatgggggcaatagtctaaataatataccgaggcacttgaatatccatcccacgcctatataaccccatcctcgactattccgcacagcaaatctacccgagcggaaattgcgcgctctccaaccaacactattccgccctattcacaaccgaaagaaactcccaattgaagtgatcgatatagaagacagagaagatatagagaacaatcaatgtcaacagcaactaacccctaaaaagaacctcagatgaattaaccaaatcaatgaacggattctcctccgtcttccccccacaagccgacggaaaccttggatactcagtaaatcaatgtcatagccttaaccccgccatataaaccccatagaacatataaatatcccccgttaccccgttaccccgatatccatgtcccgactcactctccacaccctcaaaacaatggccccaatcgaacgaatcaccctcttcaagatccccaacgacgcggatcgcgaccgcgtactagagcagtacaaggtcctcgcgaagaccgctaccaaggtgagtgcatcttgtctcttctttacagtcctacgtatagccctgtgcagtccatgctgcttggttagtacaatacatgtactatgttgcactaggcgctcggaaggaaagggagttatcggaaggaaacgcaattgaacggttattgacgggtatgtcttttttaggacggcaagccatacatcctcgctgctgcggttggcgcttcgatccctgaccctcgcaataaggggtacaacgtgtctgtcaagacgacttttgcttcgatggaggatatgaagtactatgataacgagtgtgaggcgcataaggctctcaaggcttgtgctgggcctgttaaggaggatgtgttgacgagttactatgagaatattctgtaatggaggcgagaatttagagatattgggattttgtgcatgtttggacttcgtataaagagagtacatgtatagagataaggtagagagctggtacatgtggaagctacttgtagataataagagaacacagtccattgatgatgtacattgcatacgtctagtacgccctgcccgaggatccgaggtagacatacacactaaagcaaatataattcaacaggtagcaaaacaccgatgccttccaaaatgggcatgctgagagcttgtagaagagggtcgtaatgggagttgcaaatcataatattggctcaaaacgggaaaagcaggtaccgggaggaaatcaggacagaagcaaatgactcggcccataagtatggtgtgatcacagatcctcgctaccacattgggcattccaaatatacagaaccggatattggtatccgggtttgaagggtgaagtaataggtgatcagtcaagggcacgacgaaggtcgctccatttctggcggagattctcgtggttttcagaaatctgttcgagttcgtcagttccggcatttcaggctgaatattgaaggagatatcttacctctgcccacttcatcttcgtggcaaccaactccttctccatctcagacattgattcttccatcgcacggttctcgttttgcacttcaatattccgcttcatgatccgttccatttccaggcggagcttctcctccacttcggccggctgcttgtccaccacgttcttgagttcggtgacctggagttccagcgcatcattgaggtcgcgcagctcctcattctcgaccttaacgtgcaccaactcagaggccaattgcacatgctccttgtccgatgcttcagcacgttcctcgagaagtcggacacgcgcgccctgcgtgctcacggcgtgccgcaggtgttctagttcgacttcacgctctttctcggttcgagtcttctcttcccattccgcggtgtaggtggcaagcatctctggtgtgaggggaatggcgcaggcgtcctgcaccatgatgtcggatcggtagatctccttatcagaggcaccagagcttccgaagaagcctgactccagaattgacgaggtggatggctgtttgtcgatgtaggcgtcgaacaaacgctctttcaagaaagtagtgagcacactcatgtctttcatttcaagcagtgcggccgcattgcgtcgcatgatcgcaacaccgaatttgaggatggtggtctctagcccctcctcgaagatcaggtcgtagatgcgaagcaccagctgcagcgggaagcggtaagcgaacagagtcaagaaccactgtgtggcgtacagctgaggaggaactccacggcgccggagatggcagtagagagcgggttccaggtcttctagaagtcgctcgaattggtagaggctacggtgaagcccaggcatatcctgaatgaacatatctcgtagagagtacttgttcatcagcttgaccatcatggcgaaagcatcgacttcatccatctgcgtaaatcgttagccaatgagtcagccagcctgattcaaggtatactcacgttgaacagcaatggcatggcaatgaagttcatgccttgcgcgtatcctactcccgtatcatacaaggcgtatgccttgcacagcccaaagaggccttcttggctgccctgggaaacaaagtatttcgcgtagctagtgcgagcacccaggtctcgcctaatggtcttctccaatttctgcagcgcaacggcgtctgtctttgctttcttcagacgctcggcgtcattggaggcctgttccttggacaacttatctgtgtccccttcgtaagatggactaggggcagcgctgctagaccgcgatccggaacccgagtggtgggaacggactgaagagcgcgacgaggtagtctcagtgccatttactggccgtccgtctttttcttgtgctgtgccacgcgcaacgaggtctcgatagatgtcctccatttcagcggtctggcaatccgccaaaatttgccagataactcctcggatcgtctgagggatacctcgtttgatagcggcattcagttcctctgagcttgccaaggcttggggcccgttatttacaaggtgctgccacatctcccagtccacgggggtggaagcatcagtcacagaacctgttctcccaggagcgaccggcgttgaaggtgagatacctcctgatgctgccaagatgccctcctctccttcctctgggatgataggggggctagctccagactggctgattgcctggcccgatcgcacgctcgtctgatcgacctctgtcgcatggctttcctcgcgcagacgcaacatcttgaactgatccttcaggctattgcgtctcggcttctttgaaccgacactcgagacgtcgtcgccatcacgagcgatctggtctaggttgctgccaagggtcgatacggaggtggcagtgttgcgtcggctggcagaggcggttggggatttgatgtccttcgcagtgttcgaggtcgagcttcgagagaaccacgcgaaggggccgctggactttcgaggaggggctggcggggggataggcggattcttgttcactggaggaggcgcccatgggacggagggcaggccaccggacagacccatcagccctacgcctgtcggaggggcagattcgtccttgggaggcaatggaggcggttctgttttgtcccctggacgctgtgacttgtctgtcggctcgtcttccttgctgttcatcaggtttacctcgtcgagcgatgacgatgttgataaacggtgggatgtaagtagaggcgacttctgcagtgggctcttatcatgatcttctccgttcttctctacctctgtctgcgtaacctcggacccttgctccggcttgtcaccgtgggtgggctcatcggtcgcggtgttcacctcattgtcggtgtcatagttattttcatcgttggtatctgttccttcatcctgcttattccccttttgcttgttattcttatttttcgtgtcattctgtccatccaggcccaggccatccttgtcctgctcctcgacggtctcggtcttcttctcgtcctgcgattcagaagggaacggaggtttctccgtcgattccggagacatatgtgagccaattggagggctgtcggtcagcgatcgggtggaagtggacttggggatggtgacgttgaggttgttgttctcctggatttcggctgtttcaagggcgtcgtcaaaagactcctattcgactattgataagctcgtgtcaaggcaattttgggctattgaatcagagtctgaaccacttaccccttcatattcaggactgtgtttagacgtagacatgtcggccatagctgtttatatgaccccacaacaatcaggagatggaacaccccataggatcgcaagagaacagaggctcagaagagctaaaagacagaaatggcaagggagtggaattcgcgaaaaagggagaaaaaagaaaaagatggaatgaggaaggaattggagggatttgacgagtttcaagtgattcgaccggccaggtacgctgattggcgccccagggcggaacaggtcgaagacgttgggaatgcatttgcatattctacgcaggtatgtcttaatgtgcatattatacttatatatttatagatcgaatattgctatgagaatgtcttaatgtggtatttttgttttctttaggaattcaatgtcttatggtggtaatacagagtgggtaaaggggtcaataaacaaataatcctctattcataggtatgtaactattcatattcacaaggtcttctcgaaatcaagccatctttctcgtcgcaatggatccagcttcttcaattctgatagccagcccagaatctggtcccgatcctcagaagacaaactgccttcaaccttggatgcgagaagggtgcactcaattaatgcctggtagatgtatttgcagtcttcggctccatccaacatctcctggatctcttcaatctcattcctaatgtactgcagccggtcggacgagctcaaattgggagccatagttcgttccgccatcgacgggtcaaacacacacatcagattttggtgatagaaccaaagtgactgatcataaggatcaataaatgcttgatgaatgagagatagttctgaaaaaccaagttagcataagtcagactctaataagacaagtgagaccaaccatcatccaacattcttctccgatcgtcatcgctggcagattgctcatccaaaagggattgtataagctttgtccggtaatgccacgcggagaagttggaaagattggctccaatcatcttcttggcatattcaaattccttttgggtcatgcttcttgcttcttcggcagtgccaagctccttcaaggtctcaaccacaaagcgtcgataaccccacccgtggaaattccggctatcgagagtcaacatcttacccacaagggcgagttcttgctgccagatttgctgggcctcgggaagtggtagtagacggcgagcctcatccaacagccataaacgatagttccagatccagtagcacttggggaagctccggagaaggggaatcaggaaatgcaaatcattcatgattaattctgtgattgaatgggcagcagcatcatcatccgagccttctgcttgggagaattgatactgcagtacctgccggcggtagttccaggctgtgtagtattctggattgctagacagcagctcggagatctttttcaaggtctcgattgtgtactcatgctcagccacctgtcttccgtgaggctctgtttgtaggtgagatctatcagatgaccaacctttttggatacgaaaacctcaaggttcttgtaattttctatcttctgcagctcttgctgtcgtgcttcggcggacttctcgactggtttgtatcgtggtacaccatgctatcgcaatcgtcagcccggagcggtacagccatggggagttaatctcacgctgggcatttttgttacttgacaataataaataagcaaaatgtgttacctaggcaggttgcttcgtgttgatcagatgccccgggacaactcgaatagtctcattggtgcacgaggcggtggagtgtttacgtaaactcccatttgtatagcttcacgtgatcagcactctttctactttggggacttccaaggttgtctttggcttcatcgtctttctcgtctttgccgctatgccttggaagagaggcctccttatacattccttttcttagctctaggccattactcatatacagcttatcgacctacatccagcacaatggtagatatgcaacgtcactccttcgaggaaacctctacaggcagtcacaaacatccattgacttcacactctcgatccgagtcttccaaggaaagagaacccgtacaactgactgaatttgcaactatcaatttgccattctttgaaacaccggcttctcaatcatcattgtcggagcccaaggcccagcctattctgacacccgtccctcattccaaagaaaatcaggtctcgtcacccaaaagaggtcgcagcagagtcagaaatgctggaaatgcagcagtaacaagaagttctttccgaagtccgatgtcgcctgatagatttatcccaaagcgagacttggtcgaaccaacatcaacaacctttcgtgtggccaagcatccgcagcgtctttcgcctcaagagagactgctgcgacgacttccgcccggggatgatccgttcctaccctccatcccgcgtaggacttatgctgccaacagaccccagcagccaactcggcttcaccaggtcccacatcaacggcctcgtctagtcactgaaggcaatatcacggacgacaacgttacacatgaatctttgagacatgtcagctccggtgcagtctggaacgtgggcggggcttctgcggtccttggtagttcccctagcgcggctcctgataacacgccaaccacgtcgaccaatggatcatcaactgccccagttttcgtggctcggttcttacccaagaaaccaaaatacagtgaacaagaaatccatgagtcgaggcttgcgcttgctttgggaattgatccgacgactcgacagctaggtactacttgtctgcggtatctggatgcacccctcaatccagcttccccagacttcgagcgcctatcaccatttgagtggaaggacagtgcttggaagaaagttgaaaaggagcgttgtaagtccaactgtagcttgcaacagccattccctggccctacctttggaacatatttactatttacagataaaacatatatgatattctaatccaacttttggaaatcgtgagactggcagtatctacagccttctccatggcatcagctgacgaggattgatgcccagggcccaaatctcctgccagaaaagaggttgtcccaccgaagccttttcgaacccttgatgctcccttcctcaaggacgatttttactgcagtactcttgcatactcaacaacatctgggatactggctgtgggcctgtgccaccaagtatatctctggtctgaaggccatggagtggattatcccccctttccagatctgcacccctctaattatgtgacctccctgtcgttttcttctgaggatggtgagcgaagcatccttgcagtggcccggcggtctggccagttgtctctatggagcacattcgagaagcaaccccggtttgagatcagtcatcccagtccccttacatgcgtggcatttaggccgagaacatcacggcgaccttcagaacggttcatgcatgtggaagtcgacgcagaagagattgttgtcggtgacgactttggaaacatctggtattattcggttgaatggtctgaccaagaggaccaagctaagtggaaatggaacgggtccatgacgcttcttgccaagatctgtgcacacactcaacaaatctgtggactggtttggtcaccggatgacaagtaccttgccacgggcggtaatgacaacgcctgccttctctttgagctggccaagattgttccaccgcagcatttaaattatccggtctcaaccattacgcccccggattcacctagcagcttcagcctcggtgtatttccataccttcctctgggcaccacaagaagacgaacgtttcttagacgacctgttctcccatcatggcttgctgctcccattaagcccccggccgcggccgcacttctaaatcatgcaggcaccctaatttccggtggtggacgaacggttctggttccatacggccgtcagagacatcgtctgatgcactccgctgcggtcaaagcaattgcatttgcgccatggcagccgtctctgcttgcgacggggggaggtactaacgacaaagctatacacttctatcacacccggagcggagcctgtctcgcaagcatcaatgtcttcgcgcaggtaacaagtcttatatggagcgaaactcggcgtgaaatcgccgctactttcggttacgcacagccaaatcacccattccgaatcgcggtctttgcctggcctagctgcgcacaagtggccgtcattccctgggggccctatggaaccacctgggatggcccggaaactccaatcagcaactttgactgtggaagagcactgtgggcgataagatatccaggggaagtcccccgttcctcgggtgtacactccagtagtccggacagtcagtcatctacagcgtcatcctcgtcctcgtcgacccagtctcgatctccagaacaaggagcccggacccgtggtggcaaggccggtaaccgcaggagcggtgctcggatggtcactcctaaggagaaagaaggtggaatgtggtgcacacggacaaaggaggaggggtgcattattgtcgcgtctagtgatcaaactgtgaagtttcacgaagtctggactggaagaagggcaagcactacctctacttgtggactcttcggcggaagcgagattctcgagggcctagagggcattgagaagtctggtggtgaagtcattcgttagtattttcttcttgggtccgagtactgggtactctcactatcattaaacggttatatttttattagtttagtgctgcaagagagaacttgggtaggtttattattcttcatactgaggaattgaattatgatgttcttgttttctacagtgcaatccaggtggactacatatgttttaacatagtaaatactatagcgaactgccccgtgaataaaaccaagccttagtctcatcaataccaaatttcgtaacaagtagcatcctcccaaataaatcgacgtcatcaggcttcgcatcctgaagcagacccgaaaagtccgcgttataatggatgtccaaatcctgctctagccttgatatgttccaatcgtagaagaacatagtgacgagcataggaggataatgcatcagtcccggccataaataaggcatgactagcgattttataagatgatagtccggttggtcttcagcaataacatctaagatagccgtcacagacattgtatagttgttgcttcggctggctcgtacacatctaacaagcgggatgtgcgtagtatgcaagcgtgtcggaatgcttcggcgactgctggccagcgtgaattgtagtttggatatacgcccggtaaaagaccctatataaagaggtcataccagccggcaacgagaacttgcccagtgttgtaggtaggaattatacagtaaaaagagagcgtcgatcccactccacctttcttcagctccccaaaacagatctcagctctaaatcttctcctcataacattgtatatatattgaatccttcctaattccctctctcccgccccctcacacaatccacaccaattcctcaaaatgcgtcttcaaaccctcatccaattcatcctcccatccacaatcctcgcctccgatacctccctcggctccaccctcaacgtgaccgtcctcggcgcacggcacaattgctccaccttagagtgctgggctctgcagtcgggatttgaaacttccgataaacccggccaggtcggctccgccgcgctggacttggggactatcggtgggaacgcgtcgtttacggtgttgccggctgggtttgatggtggtagacataacgcgcccgctttgcagtgagtgattttcttcctttcaaggattctttttgtacatcttatttcaaaatcatcttgaatgtgttgtttttacgttgtatatcatgtttgttttagctgacgcactatagatgggtggtcttcctctccggcttagcgcatatcacgctccccgactcgacaaccgaggcctggattcaaggtggaaagaatggagccattctggccctcgacactgctgatgtcagtgcgttgggccacttcactacctatccctcgcaggaccggacgacatccgtggtgatccccctcggggagaaaggggtgccgggtcatcgggtcttgcatgagggtccctgtcggggggaggagttgctggtataagtcgccggttatatatagaaacattggaagtccgggtttgttcatgctttttaccgtcctcgtgtatatttatgtaccaaggaacactaatgactactcgagaagtgtggagtactccatacaaggagagagagacatcaagatacccaaggtggaattcaatagacattggtagagacgcagaggcgctcggtagaggcacaagatatcgaaagcaaagataaaaacaaagaaatgaaatgcagacccggtcggatgcatcgaagaataaaaataaaatatgttcttttatagaccgttacccccttctcccatctctaattcatacaacttcaaagagacacgcttatttcctgccgcccttgctcttcttgccgacggatgtcttgctcttctttgatggcgggggctgctcctgagcggcatcgtcagactcgtcgtcttccgtgtcggcaatgaagtcaaccatcgagccatcactatcctcgtcgtcatcctcatcctcattctcctccaacgattcctcggcatcggaagaaccgacagactcagctgcctcgatgtccaaaataggctcttcgtcatcatcctcgtcgtcacttccatcatcctcatcgtcttcagactcatcaacgccgttcatcattgactcatcctcatcgtacgcctgatcgcgtattgacttccgcggcgtcttggcctcggtctcactgtcctcgagatcatcctggccctcgacgtagataacattatcctcgtcctcgctgtccatgccctcatcgccactgcggatggattgtcgcagtcccaattgggcatcgagcatgtcaagcttgcccttgaggagcaggagggagggcagactggcagagcgctggtccatgaccttgtagagggaagtcatgcgcttcaagagatcggggtggccagccagggcgccaccgtgagcgacgcaggtccactgcacccagacgagaaggtggccgtagcgaccaggccgggaggcgaggcgctcagcaagtttttgaagcagagttgcggccaacgaggagtcgagacgctggatggtagtgcggatgatggaggtatcaccggtgtggaaacaagactcgagcatgccgttgtcgttggtcttgagcgactgtgtgaggacagtagcaagcgagacaccggtgggaatctgttgcactgcagcttggggcttgccgggaaccaatgcgcccaggaggacgtcgtcgtcaagctcggcctcgacgtcgacttcctggcctgcatttgcgcgtaggagttctccgaacgatggctctgcgccctcttcttcttcctcttcctcctcggaatcgggggcgttctgcatctcgacgtcctcgttcgctgccacttgcttggcgggctttgtcttcttctcgttggaaaccttggacttcttgttgtcctcatcatcggattcctcctcgctgtcagagtcggatgcgtctggtcgtgagtcctccatctctacatcatcatcgaccaggtttccctgctcgacattcatgcgagactcgtcaacacgggtctcgcctgcgctcttaacaccattcgttgtgacggaagcaagtgctgagccagacttggtcttcaccacagacttgattccgttgaacgagagctcatcggtgttctcgtcaaggaacttgacacgctcaaagacagggatgacaccgccttcggtgtatgcaaccacgagggtagggccctggaatgagatggctgcgacgggaacgcaggcgctcgaagactcggtgttggtgattttgagggttgcgtttgctttctgggtcatctgtttgcggctggccttggcacttacggagggcgcactttggggctgaacaaatggcttagtgaagagttcgatgctaccatctgcggtgactgcagcaagcacttgcttctccggtgtggccacgccatctgtttgcagtgcaatcgacgaaacctcctggtcggcgacaaggttgcgaacaagcttctgggtggtggcatcgaagacgttgacgaagcggtcaccatcggatgcaaggaaggcacccacgccagcagactcggaagatgatgaaacgacggtgtggatagggttgcgcatggcagggaattgaaccggctcatccgccttctcggtatctattaagtacggggtctgggaagcgcagatgagaggggggttcgaggggacgggccgggagagagcagtgaagactgaggatgcggggaggtgaattgtcctatcggcatatcgttagttagggactcggtatagcccagcaaaaacccaaactcacttagtgctttgtccggtgcgcagatcccactggacaagcttattgtcaccaccgatactccaagcctcctcagcgggccgatcggccgtgaacttgaagtccttgatacccttttcatgcgcgccggtcaaggtgccgatcaccttatcttcagatggcgagtacatgcggatatccgaggtgtttgtgccgaatgcaaccacgatatccccctggtccaggccatcaacagctccattgacatcggagccgcgcttgcgcttctttttcgacaggtcacggcccttgcccgagccaccgtagtatccccagtccaaagaagtcaccgtttccttcggccccagagcatgctcacactggaggcgtcctgtctgtgtgtcgtggatgcgaatgtgctggccatcgagaccttggataacggacgcaaacaaggccaattggtactctgacggggagaatgcagcgcgcaggatggacgacttgctgcccgcatatgtcatgcccgacgccggcgaggcggcggccgagacgaccttcgtggatgggcgagtcgtcttctttcccatcttggctgtaactttttttcttatcttcgttttttgtttctcgctgtcgagggtgcggtggtgtgaagataattatcaataaagcacacccaaataaagacaataaatattccgataagactctatttttttccgcccctaaggaaacaaatgggggtttaggctggtggtctcgcagttgatccggacaggaaaaaaaatgttctgtagagccttgacgggctagtcctaaaggggtttagactataataggttcttatctaatcatatcatcccgtgatgcttcaatgtcggtcgagtatgaggccctggggtaactctacaaaactctttgatttatcttagtccagttctcgggcttaaattgtttttttgggtccggctaagtctcctttttatcttcaatccctttactatcactcttcatttcttcatctcgggcgcttctaatgtcagcatccctttcatgagcaacaatatataacaaactttgcaggccgtttcaacttatacttcctgcagccatcctcaatattcattttgtagaatgagaataatttctaatgagtttcaagctcgttatgcgacccaaaacaaattcaatatgtacaagaaacaggatggttgtcaaatcagagcccttgctataactaacgcttgcaggcaaacctgagccatctaaaatgcctatcactaaaaattatgcccaatatatacttcaaagcatatggactataccgactcccattgggcagatcttcgaggccaaaagtaccccggtcccaaattagttacatgacatgtgtatatttgcctaacctgtaagggtgaaggtgcagctgcccatcgattatgtagtagtgaatgcaaagcgctgattgggaattccaggatgcttagcggggaaccaggtagtaactagcctacatatgtactctatcatatgtggatgttttaaaattgtataacatgttccttgcgcccaatgtgtatgtatgtatccatagaaaggtgatgttatgtctcatcaacatattttggaccttggaaccttaaaacaatgtacaatacgtgtactcatcatgatacagtcacgtgaaagctggagtggtgacgtgactcagacctcccagcacacccggcctaacccggatttagccagaaccctagggctttgagtcatccgagatatgcgtccactcgacctcgaaggttttacaaaacatgtttaagaaaagtcgagaaaagaaagcgaacagtaaaaaaaaaggatatagaaaatttccattcaagtcaagactcgaagagaaagagaaaagatgagaaaagaaaagagaagaaaaaaaaaaagaaaaagttccaggggtaaagaaccaatcaaggggtaagaagggaagagaatcgggactagtgtggctggtggaactgggtaagaggagagtgcaaggcggccgtttgtacttaaggattctggcatcccctcccgaccatttttctgcttccgtcctggtttctcctatttttattctcctgaccgccctacccaataacaaacgcgtcgcgttccttttaaccgccttcaccccaagtctcccttttttttattttcttttatttttcttgtttttcattttctactttttttattttattttcataattcccttttattcctgatacttagcctcaggcaatcatcgggaacttgtttagctccattatcttggtttaccaagtcatctagacctggcttcaattctacatcacgtgagcgatttttataccgccttcttggcagtataaatacctcgtctccgatcgcattctccactcttcctatctctcgatcatctctgacctcactcttcccctccccgcccgtcgcgttttattcgcgccacgcatttgatatcaagcctcatcaactattgagtccgtactacgtgcccttggttgccgttagtgtttgttcactcgaggttattttcacgcggcaagattgtttcgcgcagagatcccacgggtgttttcagttgatcactagctttcaaaacaccttgccataactctcacatcttcaatactgccacgctttcctaacttgtattcttgtttatccaacgcgaccccaatggcgactccgcctcccgaggttcctcctgtcaccaaggaggacaagcctcaattgcccccatcccccactggtccttctgcgcctgactaccaacctaccaggtaagtgcatcggcttaagtatcggacctgttcatgatctgaccagtgtacagcgcgcaaaatgacacagtgaatctcaagaccgatggttccatggataccgagactaaatcacctgcgctgaacggccacactcccgtcgcgccttcgaacaccaatggcacaatcgttgccacctcaccgccgaagtcccccgatcatcagacctccccagagattgtccaaaacaagacaacgtcggccgcagaatctgctccagcagagacaaagccaactgaagaaaagatcagccctccgcagggccatgaatctaccactcctgctgcagccaacaacgcggctgaaagtgttccttcgtccgccacggaagctgcggtacacgctcccacggttcctgcatccacaatccctgcatccacagatggtgctaacgaccaaactgagccaatggccatcgacactcctcaagatgcttccactgccgtgaaaaccgacctgcctcatcatcctaccccggcccctgcaccacctgcgctcaccgcgccgcaggaccatgagatgaaggacgcatcagagaccccgctatctccttccaagatttcccgacagcgcgatgctgatcttaatgaagaaccagctgctaagagaactaaggtggagggggatgactcggttgttaactcccaggcaccgggattgagctccccagctggcgcaacacctggtcctactcacactagtggcggaccggggctcactaaaatgcaacataagttcatctcaaagagccttacaagcctgaagcgtatgcacgatgcgcgtttctacaaggaacccgtcgatgctgtcaagttgaacattccgcaataccacactgttatcacccagcccatggacctaggaactatggaaaggaagctcaagaacaaccaatattcttccccccaagcagtcgccgatgacttcgcactgatggtcaataatacgaccattttcaatggcccagatcacctggtcacccaagaggggatcaagctcaaggcgacattcgacaagcagatgactaacctcccgaagcccgaagaggttgaagagaagaaaccaaagaagcaaacggagaagacgtctgctgctcgccgggagcctcggacttccctgccaagccaacccaaggcttcttctccccagtctcagacatttgcgctaggacccgaaggtctgcctgtcatccgccgcgattcttccaatcccgatggtcgccccaaacggtccattcatcccccgaagcgtgacctcccgtattccaccaagccaaagaagaagaagttccagtgggaactgcgcttctgccaggaggtcttggatgagttgcacaagcaaaagcactacaactgggtgatgcctttctattatcccgtggatccggttgctctgaacattccttcataccacagcgtcatcaagaagccgatggatttgtcgaccgttcaatctaaactcaagactggccagtacgagaatgcgaaggagttcgagagcgatgtccgtctcattttcaagaattgctaccgcttcaatatccccggtgaccccacttacgtctgtggcgagcgggctgaagagatcttcaacggaaagtgggcccagaagtcggactacctcgaagcgcatgaaccacatcccgagcagaacactgattcttccgatgaagacagtgacgaggatgcggaagagagcgaagaagacgatgagaaacttacgctgcttcagaagcaaattgctgagatgtctcgtcaggtcgaggctatcactaataagaaaaagaagacgcccccttcctccaagaaggttggcaagacgaagcttgccaagaaggattccaagaaactcagttctggaaagagagacaagaagagcaaggtctcccagcctggcaaaacccgtgccgtcacctacaacgagaagcagatcatctcgaatggtatcagtagccttcctgacaagaggatgcagcaagccctccagattatccagaacaacgttcctcaactcaaggtaagaatcttatacgttcattgcacacgaaccaattctaacatacattccgcagggtaccgatgaggccgagattgagttggacatcgacgagcttcctaacgatgtcttgctgaagctgcttaacttcgtgaagaagcacgtaccgaatctcatggatgatgaggacgaggacgatgtccctgccagcgctgtagcacctccgaagcccaagaagaacaagccaatgagcaagttcgagcaggaagctcagatcaacatgcttcagagtaacctttctcgtttccagggtggcgctcactcccccgatccagtagcctcggttgaacgcaatgaaagcagcgacgatgagtctgattcgtctgaggaagagagcgaggaggagtaaaaacactcttccgattcaatcccgcaattcttttttcccatgcgggatggcccctcaccctgacttgcgttccaagcgtcgttttttccattagtgtccttccgaacaatttctcgccacatctttctcttttcagtcgcaccgctggattctgacgggctggttgcaatgcgctatgcaatccccgccagcaacgtctgtacatactttgattttgaatacccctgcacccggcgaggtttctactgccactacgaaccttacgctcaagattggccgaacaggattttattcacttgatcccttgaatttcccttcccctacgcctgagtgtgcactttttctcccgtttcatttcacaactaggataggtggatggggttgctctatttcctccgacgacgttgcggttggaaagaggtgaaccgaagctttggcttcaacttgtatgattacgaaagaaacgcggaaatgcaaaatgaatatgtacttgtaatagtaaagcatctgattcccgttaggtatgtagttcgaatgtacagagtacgaagtattgtattgtgaacatctcccttatcaggtatgtcattggccgtgacgcactgggtcttcttcggcggtgaacttccccagtttccttgcaacatcagcatgattcctccctgcgacccctcaattcttgagcagaatcctcaattcaaacgactatatgagaatttaacgacctccctcctcaatccggatgcctcaacgcgtgctcacagcgcgaacccaggccgcatagctgtggtggaggtaagtcgtcgaagcgccattgcgcagcacatacccaacggaccccgacatgaacagagctctgataacactctgtcactaggagctgaaagaatgccagactcaaaaagccaaaaagcgaatcaaagagcacatgctccggcaattggcctttgccccagacagcaatctaccagcggaggtcagtacaacccctgccgcagcccagcaagccatcaggaaaaccgcatctctaacgaccctaccacatccagtgccacgataacctcgctataataaccctctacctagagaccccgtccagcgcaatcgagcccaccacctcaaagccggaaacggaacctaagaaacaagacgaagcactcagtctcctgggaccagacatcgaagccttctacaccaatatcccagccttcatcctacccttctctaaagccctctcatcctccatccgagacctacgcgctctatcaaccgcaaacacagacccggacaccgcgcccgacacagaggcaccagccacacagcactcgaaccacaatgcacgcgtccgagcgcgcgaccgccgagtccggacctcgatagcgccagttccaccactctcatcacagctgcaggcgcggatacgcctgttgcgcaacacacagctctccgagctgccagttgctcggcggaagatggctgccacggcggcggaggttgttgccgtgcgtgcgcgggtcctggagcgcactgttgtgattttggagcgggcgaagcatggagctctggcgcgcgcgacgaaagctaaggcggagaatttggctgttgttgcgcagggcgtggagggaaaattagagtatgttttgtctcccccggttctcaagttttgttgttatttttctgagtggaatggtctgctaacggtttgcacagggttacgaaattggagattgcggctacgctgtatacgccggaaacacttgctgctcttgctcggtataggcagcatctgaggcagacgaaggagcgcttgcagcatcgccagaagatgacggttcaagagctgagagcttatggcgatgttcaggtgtctgatccggttgctgatatcgatgcggatgaagggacttacgcggatattgctcgtcggtatggggttttggcgagagaggttgaagaagtgaagatggaaattgcacgattagagagatgagccgcaactacatacataccttaggagtacatagtagaattaatatgccttcaacctatgtagtgttagttagacctgtagaccagtagctccccgtaggatgtcccaacctctttgttctttaaggtcaattacacaagtctgcttcctaccgcagtcatagaacacatttgaatcaaatggccaacctcaataaccccaagcgcaatccatgatcaacctcgatttttttcaccagatacttcgccatcgcagcgattcatgctggtacatcctacaaaatcatctacgtttggtaggcatcgcaactcgtcttcgcaactgctgacgcccggtggacttgtagtggactttgcgattgccctggctgaaatcgacgggtgcaagctcgagatgatttgaatatctccgagcctttcctatcagccatacgtgccatggcctttgggaaccacattgtccagctaagaaagctcttagttcaccaaccgaccaagtcttaaatccggggatgtccctgtcttaaccccgcgcgtcacgtgactgcgccaaactttttctgcccgaaagagtcaacgctacaagatctactcattcgccacatctcccttgaacataccgagaattattcaaaatggccgacgacggactgaacatctatgacgagatcgagatcgaggacatgaccttcgacccgaatatccagatctacacatatccctgtccatgtggcgaccgcttcgagatcgcgatcgacgatttgcgcgacggcgaagagatcgccgtgtgtccgagttgcagtctgatgatccgggttatcttcgacttggtatgtttcccatcatattacccagatgcgtgtcgctttgtgtgttcagtgggctaattttacaccctgcggggtatctacaggccgatcttcctaaagccgaaacgcagagtacgagcgaggtggctgtccaggcttgagcgtgagataaaggagattatgcaaatatccttgaaaggatcgagtcaatctcagtccgaaagaaggaccatgctgttgattttggaagtcgactcgcagccattcttgttgttgtggcggaagtggttcgagcgattggatactttgcctttccacttcccagctgtgtctgctcggcagtccatcgagtctgagcggttctgacccgccggaactcactagacggattgcgcagcgtgtgtctatgttccgctgcagatgtcgtctataggcatattgccatgtgactcggtgttcccgaggcctatttgtctcggtgactcgcactggggtacccgccgtacctcgctcactcaacacatttaatgttgactggggctcagcgactcaatccttagtgtgagtttcgcttcggacaatatcgcttggcctgtcgagacactgttccgttcgtcgggttgagactgtatttttggctatgtacatgtcgcgttcattcattcagaaagaacaacactttgatgcacctgttcattcggggtgatatgatgacccttccgttcagcactgcgttcccgctacacatatacacatactgtatactcacgtcgtgcatttgcttcaaatgatacccataactatgttcctaaattactcgttcagcttcttcgtgaatttataagaaaggaatagcgcgaaagatccaatgcaaccgcatcataaaaatagacactagactacagtatgtaacaacatcccaaatagaaatgggaacgacaagaatcttcttctttctaggtaatcgatagcccagcaagacggcccactcactcaacgacctcactgtagatatccttgggcaaacgcagggtcaactcggagttcaacaactcggtcagattcgagccgtcgcgcaggtagatccactgcccattagcgaaaggccgcgagtcctgcttctcatgcatgtaatcgccctcgacaatccaatcgtaccgcttcggcccggagatgggcgagctgagccagatctgcttgttaggtggttgcttgttgagcacataggtgccgagcgcgggaacggagatgttcaaaacaccagcctggaggagcaaggtgggttagtaactaaccttccacatttttaaatatcatgccaacagaaggtctttataataggccgagaaagataggaaaaaggaagatggagaccgagaaaaagataatatatagaaaagaaggagaaacatacactgtactcagcctcaatgtcagacccctcctcctgtgccttctccagctcgctctgcagcacgttgaaatagtgctccgagtactcgtagtactcctccggagtcaatggcgagggctcggtgatatgggtagcagctccggcaacggaacccgattgggggttcggagctggggggtttgcagattctgggtgaatgcctttgcggactgccggggaggactggaaagagcgggtgaactttgaggcggaacttgggcggatggcgcaagcccgggggagcagagttgaagtggtgggtgttgttgtgcggatggatgggcgcacggaggtgagcagagctcgggggactgtgcgggagagcattgttgtatggggtacttagattgggattcgtggaagggaatggtaattgaagattgggggagctcttctgacgatgcggagagaatgggataatttacatcatcgttgttcaccgcctgctttatttagagtgagtatgggcagtatctgtgattggatggaggtatagatgacagttgctcgatggggtattttatttataaaaagtggactatagatcttgtacgaatatgatgatttagaatccaaaaatttcgaactgatgtatagatatttgacgattggccagtgaggatacacttgtgcgatgaccttgtcaccagcaaccactaaggctaccgcaatgagtgactccaaaaaaagtaaatgattgtagaatgtgttcaaatttatttctttcatgacgtagtgtgtgtttggaagaaaggtggtattggaatgacttttactccaaagcaaccctgactacttcggcttggattgaggatctacccttggaatttgtatatcagcattccgtagtcatttggtaatgtaggtgatcaatggagccgcagtatagacctccgtatgccatagagatttatatggcaattacattttcgagtggtgtttggcgggtggtaaacaagacaaagataacagactggtgaagcaatgacgtggtgtacgcggccaatgctaccattgctcacaataacgttgacatgcacacggagccgatggaatgcacccagacagccgtggaggctggaagccttgctgttgtagaggtcagaatgaccacaaccaagagcctgatgcccacagaaaggagactcatgtgtaataaaactgctgatgcaagaggccctcgggtacgcatgccgcctgcccgaaatcagcatatacgatgtgttaacactgagactagcatcagcaccgatagcgacatgttcggcgccgtccgtgatgcgttccaggggactcgcatcctgctctcgtctccaggaccgagaaaccgaaggaatactgatgctgaaaatcccatgggaacacgaggtcgacttgttatatcaaccgcagacatgcgttgtctcgtacttcttataaccaatcaatgacatccattcaacacgtcttcgtatcggtgactgtagcaaacatatcggactcgttcggtgtctccggtatatggcctgagtgcctgacgacgaagaccaagcgtccgaacctaaaaatggtattcgattaggctgcctggttgttaaggttagtcgaaacaggtatgctggggcgatagcttaagcaagagagcgatgccccagcgagattggtaatttatgagcaataaacctcccgtatctttcctatccatttggatttggaggtgtgtatggagcaagccttcgacgcagtaggatgacgtgggcagagcgccggaactttggaaagtgggaactgagacaagccacattacttgccaacgcggccagaacaagtgagattttcaaaatcttttctttttcctcggagaaaattttatgataataattgtccgggaatcaatagtccgagaaagtatgttgaatagccttgaaaacaaatttagagtcctggaccacgttgacgggatcacaaagagatcggtggagtttagtctgttctaatgagaagaaccgtagtcttggtcatggcaataaagatgcagacatgcatatccctcggaaccatgtccggaatattggctgcagaggcgggaggtgactgaaatctgatctcatggcgcccttgcaatcctctaatgcagtggcaagtattggctcggggaactacaatgaactacaatgaaatcaaagaatgaatgaaaaccgtaaagtaccacagggctggatgatatgattaaaaattctaatctgcttggcaagcaaacctttgtggcatccgcatcttgtagggtacgctggagtactatgtcctaacagcctataggagaactgggaataagagcattgatccccagtcatcattccaagggagacaagtacaactagcaaatcactacgagcaagaggtgacacaaagaaaccggaaccaaaaccgatgaaaaaggaaattacgatatacctttgctggagaacaaccgtagaacatcaaatggggcgccaatccaaatgcaaagtaccggaagaaacaacggcgtgtagtccggcaaggcttgtcctggccgtttttcggcaagagatcggcagggggcttgaagaggggttggtttcagacaagcgccccatctttcttctagccctagaacaatccagttgatccagaagtaaggaacgcaccggtctatcggtgaaagggagagacggtctagatcttatgcttggatgtgaaacatggtgtcgatcggggttggtgttactatgagtggtcgatttgacccatcctcttgatgtggtggcgcctacacagtcggtgtgtcatattagtcagtttcagttgacgcctgcgtttgtgtggtgattgtattctgtcggggtgagagatattattttcttttgcgaaaggaatctgaaatctgaagtattgaatctcacagtgttacaatctcacagaccttggaaccaatttaaattaaatgtagtgcaatgttttggggttttcattgggttcctagggttatgttcaataacgcaatgatatgataggtcacccaaggacccaaatgacgatgtatccaaggtgcgcctatcagagcggctcccctgaccgggaaccagggaactgcgcgtcggactacatggcaaaccactggatgatgcaatgccatccgtggtacgttattgtccccacatcacctcaatttatgtcaatttcttgtcattgggctgtgaactcttcggttgtttctcattgcataccttagcattctgtcaggggcgtgccaattattattaagacaaagttacaggcaccaggaacagagtcccaaggcgtgtattccccccattgcatgtcaatatcggaattcgatgtaatgaaccccattatgatccaggctattgtggagtggcctacagaccttggctgtggagttagaccagatgcgaaacctacttgatcccgaagaattgaaagaattagtgtcaattagcgccttggagaatgacttttcattgcacatgtaagaaatgtaagaaaagacgctcggttcaagccaatcaccatggttcgaattcctgtcaatggcccatcaggtccattaaggtccccttggtcttccccggcgccaattatattttgcatacagttgttctggccacaggcatggttatgaggtcgagcccgcctcctcggtccccgaatatccaataaccacttcctatctgcactccactcgtgaagaaatgcaatgtcttccagctagcgggttaggctggtaggtttgacacactgatgcctgggtgatttaaaacctccgcctcccttgatctttcttcttcttctccctcctctccaaccacctaccttcccttcatttcattgctggtcttctagtcctgtgccgtgcacggtctgagcctcactttccttcaagtctacattccttatcctaaggtcgagaacaggtttctctctttttttccctcttttcttctattcttccaagtccactccttttgtgactttagctttcgacttcatccaaaatggtctctttcactaagcttttcactgctggcctagttgccacttctgctctggccgcccccatggaggctaagcgcgcctcctccagcaagcgcggtgctgcctacaacgacgtcaccaccgtgtcttctatggccagcggtggctccatctcatgggcctacaactgggccggctccctctctggcctgcttccctctggtgtcgagttcgtccccatgctctggggccctaagatgttcggtggctgggtgactgccatcgagagtgctttgtccagcggaagcacctacattctgggattcaacgagcccgacatggcttcgcagtctagcatgagcccctcggatgctgccaactactacatgacctatatcaccccgtggtccggaaaggcgaagctaatctcgcccgccgtcacctcctccacccaggccggatccggcctggactggttcgagtctttcatcggtagctgcagcggctgtggtatcaccggtctggccgttcactggtacggcaacactgccgacgatttcaagtccttcgtcaccaaggccgtcgacactgcttccaagcacagcctgtccgaagtctggatcaccgagtttgctctcaacgctgatatcagcggcgccatggacaccgctactactgctgctttccttaacgatgtcctcccttggttggattcgcaacctggtgtcactcgctactcttacttcatgtgtgcgaacaactacttgctttccggcaacactctcaaccaggctggccaagcttacgtctctgcgtaagcctgtgcttgttttttgacatgttgaaaatgaattagaacaatgaatcatgaaataaaagggagggtatgcacatttcacttttcttctatgggttctactggcgattggtcgccttggaggatcatatctatggattttctgttcatattttctaaggagttttaacgcaaatatccaccacgctatctgatttttatttaaaaccaatctcggtaatcgtaagttatgtgtattaagtccagaatattgacatgatgaaatctcgccatccaccttagaatgaggtggcgagttggcaatggtcacaatggcataaccaggcccgccacaatccatcacgtaggcaaattcccaacaaaggcaaatgtctcattgtttgtctaataataatgtaaactagaaacctagctttgatacagtctatcctttgatcccaattcagtgtttacaaagaatagatactaatttaatgtgtaccgtcacattctcgtctttgtccctttatgtatctcttagagatattaacaatgcatattgaatcaagattcaagggaacaataatagagaatcttcagtcacaaaggacctctcgagtatcaaaatggaaagatccccctcatatgatcattttcaagcaccatccaagcaccatccaagcaccatccaagcaccatccaagcaccatccaagcaccatccaagcaccatccaagcaccatccaagcaccatccaagcaccatccaagcaccatccaagcaccatccaagcaccatgaatccgaacacctccaagatgactacaaccaatcctaagcagattaaaaaaaaaaattggccccagagatacgatcaaatttattgctacgagcgtcttggcatatcagaaagtacagaagaccaacaggttgtcctcggtttaatacaagaagtctatgatatcgtagcggctgatgcttatgccaactacagaagcctcatgaaccttttcaagtcaaactatgcacgcaatacaatcatgtccgagattcgcaatcgcataccgaggttgccagcgactgttataagtcacgtcgcggacaccgagattctggttggtatgctgtataaatacatcatttgcattcgagacgacttggaagtggactttgaacgccggagaaatgaagcaccggttgaaccgaccgaggagcaatcggaagagtcagcactaaagcgaccagaacaaccgatgaaattcgattattctcggccctacatagtaccgaacggcgatatccatatcatccgagcagagcaaccggatatgccaattgcaattagagtgagtgacttgttaactaacagagaaaacccgcaggatatatcccacgatggggactgggtcaacatcgcctacattgaattcgaacgactcaaagaaaacctcgtccaagaagcctatctagcagacggagaaacaatctggcttgcccattactctctggaccaaattgaccgtaggaatattgctaacccacaggccggagaggtgcgactgacttctcagaattttacgtctacaattttgcgaactatccgtgagcattggcctaagcttcgaaacccctcccctgagcccttccaaggccaaggtaacaggcgctcgccattacccagacctaatatgactattattatccgagacggtaatgtaaaaggtaaggcgccctttgcgactccccttcgattgaaagaccacatactaacattattcctctataggtggtgccctcgctggtaaacagccagcagtgaatcgcccttctgtaaggatgggcaccggtcgcaagctcgtttataaccatcgtgctgaacagctagcccgatatgcggccaacagacaggatgtagtgaaacgcaagagggcagaggcggaagcagaagcggaagcgggagcaacagcagaagcagaggctgagacagatgctccaccggctcaaaggagaagggtacaagtaccacacaaaactgccactactcccgctccactcgctcccgttggacaagaacctcaggagggaggtgatagtgacgctgcttttctcgcggggctagatcctgcactcttcaacgatcctgcactcttcaacgaagagggacttgtccgcgatggtagcggcgacttacaagagttcttggagcagaacgaatgggcccaggaaccgatgcaggaggattgaaaggagcaatgggaaaagaggtaagtgaagtaagcaaggtgaatatcgactgacctagttattattgtgtttaatgtcattctatgctattgctgtaatctgatatctctatactactacgattcacgtaaaaacaacttgcacaggtgctttctttgtccgtgcaagtgcaatcactcagaaagcccttaactctactgtatcttcaaacacaaactatatcaaagtctcacactttggtcctatgttcctttggacgatgccactctcaaaagtgacattcttctctgttgacttgactctaactgtgtctaaacgtgtccgcttgcaaagaatcctcaagtccgatcctgttgtctctttccctctgagacaaatatgcgacgtttctgcgatatttcaagcgcaggtaaatggcttacttaccgaccccgactggaacttatcaacctgcgaaacataatcagtacccgcgctcggatgatgaaaggggaaaagactcaccagttcggcgatgctagcataggtaccgcatccaaaaacaatcatgccaaccaggaagaccacaccatttagaattgctgcttttaaattgtgcttttcataccatgcaccctctttcaaaagcacataccacatgactggtgggatataaaaagagagaccagacacgaacaaggaagaaatgatagagagcaattcggaaaagatggggatagcctcagcaatgatccaggctaggatggtaacaacagagacaagaccaagccatgtactccatcccttcgcggtgttgacaaagcgaacaaccgagtcccggtatatttttccgtggatatatcggcagacaacggttgtattgatagaccccgaaatgaagatgactggaagcgctatgccgaagacaacccttgagataacggggcccgcggacagcaaagcaggtgattgcacctcctgcccgacaaaggcatagatgattgaccctgtcagggtatagataacaatctggataccacctagccaccatagtgttttgacataatccttgggggtatgcatatcttccatgaaagacggcagacaaccagcgaaggaatatgcgaaaacaatattattggtggctacgatagcagcggagaaagtgagaccaggctttggccaagcagaccagggcgacagatccgcagcaaagtcacccgaaccattcgagctctgaataccggtggcaaccatcgtgatcccaatagccaagataatcgacgcgaagtcgatatagcccagtatcgcaatctcagcgaacgacggaggaatagcgagcaacatcaggattgcagcagatgcaacgctaaatataaccgagcacgaactgctttgagtgatattctggaacgcaattgctccagtcaagcaatgcgacccaataacgaagacaagaagagcaacaaagctgccgacgaacagttttgatcccaaacttcccattagaagtcggccgacgtctgcataatgaccaacttgtgggtaccgcagtttgactgcgccgatgttatagcccgcgtagattgcaacgaagccaagtccaatcgttaggatcacgcctgcgaccattccgagggcggcgaatgcggatggtaggcctaggcttcccagggcgattgcctcaactatcgaaatgacagtgagacgtttccagcctaaacggcggaatcgggcatttccttctaatattccttgtaactccggatcgaaaaggatctggtccttggggagaccttcgctggccattgtctcgagatatcgtgggcagtgtatcgatgatttagtgaaccgtacgccagacttgtatagacgtaagtgtaagctaacaaatgtaaatgtcgacgaaaagcagtcgaaaccaaaatgaagaaaaggcggatcagataagatcaaagagccaaatcgaccgatggtcggacctgcaaagtggatctcgggagtaaccccctcaacatcatgacattctgggagtacatagtgtgatgaaggctgtcttgatgtggagcacagtggggttagtcaaaccaatgtgtatcaatcatattgattgagccgtggggagagactactgattcgcaagattcctggcgctagattcggttcatttatattcgtcaggtaacaagcgagacgtgtcggaccaagccgcaggagcaatgagacaatgtcatccactaggcttatactggataagcaccgggacttttcaaggccattagcaaaattttcgaagtgccaaaccccaattcccgaagattgtacgtaattgtctctcataaacccagtttgtgaagaacatctcttgctttcctggtcatttgggaggtagaaatttcttattccggtgagattggcaaatgtgatagctgttgttcagttttcttctctccattttttgtttacggggccctcttgatgttttctcggcaataaatgccaaatccgatatctggacgctcaaggagttgaagagcacatgggaagccctgtagggcggcacctcgggcggacccgtgtattcacgtgatctgttttaagtgccaaggttcgaaggttcagaaaccaagctagcctagataggcatagcggattgttacttggttgactatatgtccaccagaggatgtgtacaaacaaaacaataacctcatgccattgagagtggagtatgatatatatgtcactcacgaatagttgctcggttgctcttgtgatacccaactttaatcccgtagcaactcttcgtatgtcggaagttgacagtcttgacaggatccgcacagaaactgctgagagaacctaatctgaaaaaggaagcaactccataaaatgattcatgagagcaacgggcaacgccatggccaaaatcatattccaaattccctcgcccttaacacatttcctgcaattgtctgataaaaggacgaaacatctgttcatactcctggagcgcacccataatagcgtctatggtatcattcccttccatgaaattcttcccagaagacccatcacagtgccgcccaatctccccagccaagaaatagacaccagcaatcccagaagtggtactcattcctgtcattgctggcggacaataagccgcatctccgacgagcacgacacgaccgcgagaccaacaagccaacttgacaaggtccatacgcccacagtttttgctctgaagcatcgccctgcggacggttcttgaacttctctgaatcctccaggatgccaatatatgcttgggatactacgccttccggtagctgtaacgacttcttaggactagaattgagggtgtcgcctatcgctctgtcatccggagacgggctttgaaaacggagacgggcttttcaaagtttcaccttctcggagggcacttggacacgtaagactccctgggtccgaactggtcagcaatccagtgtaatcggcacaaggaacgtaggcatctagaggggaagagaagatagagaaatatacctcttggacacacgtggccaccaagatcccctcgggagaccagaccctctgaaccaccagggcacgatcattgccagcccacgggctttctctttcggaacacatccactcatccgcccgcacagcttcgggattgtggaagtaaattgtatgattcagactagctgccatggccattttggtcccgaacgcttgacccgccacgtcgtgtacttgaactgcggcgccaataagatatgcatcggacatgtatgccagcgccgcgagctgggcctgaggacttctctgctggatagggtccttggcccgcacccagtatcggatctgagtgttgactaggtcgtgagatgcttctattcattatgttagatctgaataaaagcaaggagaaaactaacttgaatcacgaatagcgccagggaaaaaacttacgattcaggatttccccccaacgagcctcaaacggcccatctacccccttcccatccatctctgcttgatcaggcagtgtcaagcccttaggcaattttctcccatgttcgagtctccctgctttgccaatgtcaccgttattactgtacgttcccacccgcacaaagttgacaattgcctcagagatcacaccggccttctgggtggcgtggacagtcctcgtgatgaagcttttcccatcgcgtgtacgctcaacacgatattcaatcggtcgctttggattaccggggctgacgaagccgcagtggagagagtgggcaacgtagtcgcacgggacggtcttttgggcggccacaagacaatgggcaacagttgatccgccgtagactccatagccgcccgcgaaactccacagcggttgggcgttagtgaaggtatcctaaataagaaatttactactttagagagacagatgaccaagtaaaaagcaaaagaaaataaagaaagaggtgtaccggttccgaaggaattggcgtcagttcgacagccttctcaagaggaatggtgtatttgtccattagtgctgattggacgaatgtgctactcgaatctcagagtgcttggctatggccattgggggatgaatacccttgagagaatcccaacaaagagaatcgtagaataaagtaccgcaccatgtgaccacgggccctgatccctgtctcacgtcccctaatttacccttgtctacctaactcgtacctaaatccctgctctctctatcgtccatcgttgaccacgctactaccagacacgaacgaaacgtatacgtatacgataccgacggtgtgacggtacacccgctcgtttgcagggacctccggacctactaaacccggtcaaccatataacagagtgcggaggaggataagcaggcagggacgccctgcctgcctgctatcctctctacattgtgtgcccacagacggtccatgcttgggtcgacatgtatcttcgcccctgatttcttccgtcggccttgacggctttcccgggtgctatgtacatatgccatgcaacttctcacccccgttctgcccacccgttctcgctttctgatgctatgggagcatgccctctacggacctgtgagaactgccggcaccggcgccgatcagcttctgcgacggccggagagccgcagaatcacaggattctcgaaattctcaaaattataagcgccaagaaattcgggcggttacacccagcccccggcgccaatgatttgggactgttctcaaccggacacttgcaatgaacgtggtcatgggacgtcgtgtttcagcttttccaaatttgagaaactgttcactttgttgttttcaaccacgacagtctgccttctttttagcatcacctcggtttcagccaacgaccactacccttccgtttcgcatcgttcgcacgatcacgagtctctccgaccaaatgacaacaccaaatcctgatcacgagcactttttccgttatactagtggacgatagctctgagatgaagaaaagcagcttagggataggtataaggcctttaatgttgctgagctgcaaagccgcgcggccaaagtcgttcgatcagagagctgcatctctataacgaagctggccgagggaggatataataaggtcttctatttgattatgaatgatggaaaaagagtgcttgctcgtataccaaaccctaatgccggcccagcgttctatataactgcatccgaagtcgctaccatggagcttgtaagttcacctgaaaccagttagtcgcaagggcggctagttcatgctcaacctaggctcgagatttccttcaaattcccgtgcctcgaatttttgattggagtgccacatcaaacaacgccgttggctcggaatacatcattattctttgaccaccacgtccctgagaccagggacattcagcgaactcactgattttggcccagctgtcacaatgtcacaacatctgaagccgttgtggccactccaggagggtgaactttaatgttaatcggcaaatgtgacatttgactgccaagaatattactgcctctgcacttatctttttcttctctctgctgttcttccatctagagctcatctcggattttatctgggacgtccaaaagaagaaagaagcgagtgggcatggatcaggccgttgtgcctgcgacatctggactgtcttccattccatggcggtgtatggtaattaacaatgacccatttgaagcagaatcccaatgcacgtaaatacgtataaatacattaaatactgcaatacagctaagctggggttagttttgaactagccatatatggattagtgctatttcgggtacgagccgagaaccaaagcgcgtgtatctgaggacatcgatcctgcatatacaccggattttaggccgagccagatggctttccctttccgttttagtgctcaccccttgccgctctttgctcactgagtaaaactgagcacgcccctgagtattacataatttaccaatcaaggttggtattatcccaagactgcatttgattgaccaatcactcatcgaactacacgcatgggccgtgcttatgtaagtggatctggactccgtcaaacccaactctgccaaacccaactctgccaaatcggcataacgcaggaaaatcaccattcagcagcaagtctgaatccggagaaccatagccaacgatgacagccgcgtaccatacgaggattttgtacgattcaggggtatatagacttgtgtattgatagcagcatggctggagtagcataagggacattggtacgattcaggggtgtatgatattgcttttctataattaccttggcgttagtacttcaaatggatgctattctgctttcagaacgttggcgcaaatttgtccatttgttctatctccgtcagcagtacgagtatttacaattttgtttgacttatggctatatcaagtaccctttggtcacgtatcctcgcgctctttcgatgctgcagagtggtaaggggacagacacgagaagaccctcaaggtttggatactattctgataacttaacgacaatccaataattattgattcagatcaaggctatcagcattcagcgctgcattctggtccttccattgaatatatttctgctcaacgcctgaatgagctttcagtgagtattccggacatcatccaatccacatctctaaaagcgaataaataggaaacactatctgtctcggattttgagatcggtgatatgcgcatagtccaggaaatggtaccggagcatggcaaagacacggagagcttttacctcctccaacaagaaatcaggaagaagaaaaaattgccagacacagattggactatactgtggttcgagcactacaaagtctcgtggggagagatggtcagaacgcgcattggaaggaagctcctggtagaatggggcctgcagcacccggccttcgaagtggttagcgaaatatttcctgaagacgacgcttctgactgttcctgacctgcccagcccaacatcctagatagcctctttatgcagctgagttcgaagattttgtcaacggaaatgcttagaatgcagttttggagagggtaagagcaattgtaaacttgtacctgtgttaagccagtgatcaaattaagggccacaatcggtcgaggccgaaccatcccaagagtataggatcagagccctcgtcaaaagtcgtgcaggagctctatatgctaaaattaagaggggataaaacccaaatctatttaattttcaccggggtttggaccacagggtaaaggccaaacttggaaagtggataatacatgccaaaatggtcgaacctacaggcttccccaaatgaccactgcttctgtggcattaagtagtcgcgggagctgtgcctgtgcgtcaaacctgcagtcgtatctcagccatgcagcctttgcttggttgaggttttgttattttttaacctgccactgattgttattaaaagcgggccaatgccccatcgttccctgtgctgaaacctttcagactggcctaccgctcagatatggagactaaccgcctcacattaacccctaccatacctacgcctcaatgcgctcactggaccacctcagagggtgctggctccgaatacatgcttgacctaccttttcctaaccatccgatatactctccgtcattcaatttcaccgacactttctacactgaaaccttggaagccgaggcaaggccaagtatttattaacgcagaagctatcaaccttgggactcgtattatcttttgaaactctcaaggtcctgctctaaagccactccacccaaaatcaaaggctcggagtgctgcataacaaacatcatccttgcccaatgtgtcttgcttctgttcctccacccgtgcatggtagcacgctgaacagcgatttcgccacgacgtaaggttctgacctggccggagtccaggatcatgtcgacactaccctccaaaacaacgccatagtccaagctttgggtccgatggatcatgggatcgttgtttggtgcgaagtcgacgattcgacatatgataccacctgggtgcaccaggcctaaatcctccgtagcgaggatctgcttgctctctatcatatcggcgtcgtcattgagatttggtgggaatttcgaggtcgcgtatacctcgtgcagcgaggtttggctatttaatgttcgccatggtgccgctctttcttcttgaatgatggcgtgtccgtcttcgtcgtggccggtgaccaggtgtgtcagaccagggagttgggataaccgtccattgtttgggacgcgagcttcctccattttcaggtaattctcagagaaatagataccaaagaaattttcttggatggtttctaagtgaaactttttggtggtttaatatgtgtaatgagtgactgcacactcgaaggttttatattgagtcgttgctatcaagtccgctggatatctcgcattaccccgcggacccacatcgagagtatatagaccttagcagtaaaccgggggtcacactggaaccaatgaatgaagaaggcggataaagtggccatgggtctcttccaaggttgtattggacagcaaattctgcaagggcagcaaataacaagacgaacactcctcagtcaaaatatgcatctggtttcggaaatgagatcactccctctccgcatagagagatagaagtagatgagcctcgaaggattcgtagagaagtggcgtagaaaccaatcaacaatgtgtgacagttgaatgttgccactatagcccgtcgaatgtcctcttccctccggggaaattgtgaaatgcgtggccccgcaatatttgaaatcttatactaggtatgaaccttacccagtaaaggcgcatgataatttccacgctttcatgggggtgggggggttagctctgtgagacgatctgacgattacaagccttattcacggtccttttgtggtcaacatccccacatactgatttaagtaatagcccactcaatcgcattctgtgacgtcaggatttgcgattgctacggtcgtgtgaatgcgtcttggattcggtggaaaccccaaacgttggattcagttcgttgccatgatttttggggctgcactaggtgacaagctcgacggtagaatttcagacctttttctcaagtttcccaaaaaagaaaaccgctactgatcttcacaggagatcgtttgtggctagcttatgttgtacacggtactaaaccggacctttccactttcctcagctgttcgcagcttttcatttatgtggtgtctctggcgtcatgtgtgcagctattaccatatatgcgcatttctccaaatgatggttgttcgtttcgttgctaccggtggtaggtcttgatgagagcttacttgaagggcgcggggctgaaaaatacgaagacctggtacaagcttgaatgagagagggattcatctattaaacaagattgatatagaaatatcaaatcaggcataaaaaggtagcccggtaggccgaacatgtaaaaagactcattgtggaactgataccaactggtttccacaacctttttcccttagtccaccaagcagacgatcttgcccttgctagtattagcttccaaaagttgatgggcttctgacacatttttccacgaaaagacacgctcaatcggaacttgcagcttgccactttcgattccaggtagggccgtcttcaccatcttttctttgacaccaatttgatatctcaaatcgcgcccgcggagggtgctgccagtgatggtaattcgcttccgtagaatgggcgcaatctccatgggaccaggcagtgttgacccgctcatcatgcccaagatcacgatgcgagcatcctcagcggcgagatccaagtttttggtaaaatagtctttgccaacaaagtcaattatcacatcaactcctccattattggtgccttctttcacactttcaagccaatcgctagtgcggtagttgaagctttttgtagcgccaatgctttgtgtgaattccactttttcatcagcacccacggtggtatacactgcagaggcgcctgcagcgactgccagctggattcctgcaagtgaaaccgaggaagctcccgcatgccagaggaccttttcccccggctggaactttgcgacactgtgaagtgcttgagtggcggtaatccaagtctgcatagtgtggatgaagagtcagcaagggcacctgcaggtggataaaccccaagcctggcttgtcccgggcaggggataccgatgaacacaaacctctggaatggcagcggcgtgttcccaactccagttcgcgggcttcttgatcagcatatgacgcgagacacggacgtattctgcataggctcctattgccagagtgatcagcgcaaacacccccaacaagagtctcctaagaccaacctccgtaaaccaggccaaatacctcatcgccgactcgccagtcaccaggatcggttgtacctccgatctcagaaacagtacccgagaattcgacacctagaatgggaccggcctggggcggaacgggataacgaccctcgcgctgagtgatatccatacgatttagcccgaaggccttcactttgactaggacttcatcttcttcaagtataggcttgggcacttcttcaataaaaagggacgttgcaggtcccttggaccccttgattcctttgtgagtaaatcaagttagcacacggccagttggaacaagtacacgttaggagaattgaggtctcaccgatagcccgcatcgtggaggtatctctgagcgttgaggattcgagatcgactgaactccagtgcagagagaacttataggcctttccattggttacactggttaatgtacaatgatcagtgaaaccaccgtcgtaggctcgaagggtgatgtaatatccgggtgaagtggcatggagtatggacggatatacggataaggtggcgttttgccgatgttgaataaattggagggatgagccgacaaaggggaaacttctcatagtccgttgaaatgtaaacattatttgagagctctccaagtctcgtatccagtagtcaatcttaagggcgatgtaaaagaagtccagtcgctagttatacgtagtgacccggagactgagattccctcctcagccctggaggccaacatatatgaatagtgacttgacatcgttgttctattcccggatcattcggcattcagaccccatggggttcccaagtaatgatcgtagccccattggctccttacacgaggcgctacctaaaccttggaacttcaaagtcaaaatacttccccggttttcttattttttgcttctacactacatcccctccgggcctttttctcgaaatgagcaccgccaccttccaatatcatgtatgtctgccggttatgcaataagaattatcagtcgcgaggctccttgactcgccatgtacgcaatcactcggtcgatagcagccaacatgtttgcccaacatgcggtgtggccttttcccgccgagatctcctgcgacgacatgtgcaaatccaccgacccgaggatcccccggtttctcccagtactggggtcaaacttcacaactcagctccccggcggcgctgtcatacagcctgtcaaccttgccggatggcccggataaagtgcaccggagagcaaccctgcacccagtgcatctctagccaagcggagtgctggtttgaggctcgtgcgcatcgagtgagtaggattgttgaggttgaccctacgcaagaccaagcgcgcgacttgaatcttgaagactcaagggtcgaggatggtgcctccccaaagaccaaccgtgaaccggcgatgccgcccgtctcggacatgcttcaatcccccgtgtcgaacagcaacagcccaaacatcagcttcctaccctcggatcactcaatgtcgcagcaagatcaagcctccgaaatgagccaaatgccagagattgatttctcttgggcgggtacctttccttgcaatactgcgtcgtggccctggttgcatgagagcctttttcttcaaggcaacccaatgctaaactggccggactcttttggagcatcgcccttgaatcaaatggatgaggctgcagttggattgaccctcgtccctgatgaatctgcgcaaccgacggtttccgatatcgcgctcccaacggaaccaatttcgttcgatacaccagccactcctagcaaccgaattgatatccgagtatctgaacacggaaaagaatacgagacatctcagccagaattgccagattccttggatctgaaagccgaaaaagcctggcaagaaagcattgttcacgaattggtgacttatgcaagcggccaaaacattactcctggatcgcagatggctcgctccttatattggcagtctatttccattcggatagcagaagcgttcaactttgggtcctggcgatcgggagaaccgaagctttcgttgtttagaatgatggagatgtacagggaaaacttctccccactctggccattattaagtgggaaagactttgaccccgatcatctcaacccgatgctttttctcaccgttgtttcaatcggctgcatgtatggatgcgatcgagagtgtaaatttgggaacatgctccatgaagaaattcgtcgacatctagcaggatctctcatcggccttgaagatggggaaggcgacattctctggttaggccaagccagactgttgacccaggtggcagcactctattttggacagcgccgggcattttcctacgcgcagcaccttggtgcaataattgctgcccaggcacgccgtatggggcttttctctacatgcggctctattatcagcgccgatagctccttggaacaacaggtcgctgcctggcacaacagcgaaagtcgcaaacggctagcattcggaatccttcgagcggatgttttcacaagtgtcctcctcaacacacgacctttactgtctgccgaagaagtttgtctggatttcccaaccaatgacgagatatgggaaggcttggacgaagccccggctgacgaattggtagctcgattaaaagccgaggcaccaaagacgttagcccttcctttctgtgacttggtcagagtggccaccgaccgcggcgaaactattctgagcatgaacgctcgaggctacgaactgttgatattcggacttcaggatcaagtgtggcgattcagtcatgatagaagcctgtttacacgtctcattggcaaatcagatggcgccctcacacagaaccagagtactcctgaaagtatcagcgggagcttttcaatcccatcatcatctcaatccgatcaattgggtcttacataccgccagatgcacgaccttcgggatgatcgcattcgaatcactcaaaccctacaaagatgggaacagagttttacagcaacccggaccactcaaacattcgctaaggaccgcagcagtgtaatgagtagtatgcttcttcttcacatatcgcacttgagactctctgcacctctcgccgatctccacaccgcggtctacaatctcatcgacaaaagttccctggaccagacaaagttacaagccctatatcagtggacaagtagcccggaggctattcaggcagtgaaccacatttgccagatttggctgcttttgcataacgaaagccatcgggacggctccgaaaaagcaaaatacaatctcctcgctttctccggtttacaccatgcagccgttgtgatttgggtgattgcaggtgctaattctgaacaaactgacgatgctcctgaattacctgggtcatataatatggctccaattcccatcagacgaagccataaccagttactgctcaaaactgtcattggtctataccagcggctcataccccgaggatggtcctcatttgcggccgccgcggaatatatggccgctcacccttttcccacatgcccttgacaatggagttttcatgaccatctatcgattgcgcggctccaaggtttccgatgccatccatatccccaatggcagtattctgttccagggcatttgagtaccatagtaatcgtggaagatacttcgaaatactaagtcatttcctcaactcgcgccatcgaactggccgatgtctattactttatagcaaacaaaaattgttcatacctaggtctcccagcgcacacagtgacattctatctagctcggcgctagacatatcttgtcccaaggcagtcaacaaatcagcttcggagctttccggcattggtccgtcggcgcggatacgacagtcccaagtcggcggcatgctgtccaaaggacattcgatgagcagaggctccggcgggaatgaagtggtgtggattttatcgccttggctgtcgggacccgcatcgacagcaaaatcaaatgctcctacccaatcctgatctccattcatttgatcaaggctgaagggtgacgcttcagtgactgaatcttcttgtgtcttaatatcagctggtagaaatccgatcgtggattcagatctttccaaagaatcacccacaagctcagaagtctgtggagctgacgtaccggatatccagttttcagacatgagttcacaggacaatcttgggaaactcatgctcaaaattctccgcgtgatttgagcagacatccatgttctggagcagaattctctaagagcttcaattcctttgagtatggtggtgttgtagcattcccaaagcaatggatctttcgcaactagtttgatgcccaattccaacgcgaatatccagatatgtagatatggaaatgtgaactttggatgctcattgggaagggtcatgagagccgagaggatggtgtctaccaggtgaaggcaagtgaaacttgttccttctcggcctaggggagccggacattccgtcaattgcggactttccagtgctacatgactgattgataatcggagaaagcaccatttctatgatatgtgttagcgttgacgtgggatctcaattgctgtgccgcgcaatcgcaaacccgcaattgatgctgaaagtgaggagatttgacatacgacttgcatcaagattcgatgttttgtccccaaggacgtgttctcgcaggacgataaattctggtgtttgtccgcttgggtcctaacaccccccaatgtttcggctttttggactaaagattccatcctctcgataagaatgtaaccgaagtcggtgcttgtggctagcgtgtggtacaacgtcccccatactctatttgcagctcttgcatgccatgtcatacttgacaagctggaaacaagaaccgaaggtgttttcgaaacctcttcctcgatttccgagcaaagatctgacgaggtcgtggaatcacgcagatgctttgaaagccactggtcattaaaattccttgggaatgcaaattcgacattggaatcctggattaggagaggacccttggtttgaagtcccaattctcgctccaaaacgtagacacaacaccaaaggcgtcttagcagctcgtcctcgaatacgggcagaaggtgcaatttcgagcggcttccaacattgtgcaaatgtgaaatagcaagagcgagaagctgtcttgcatcctcagttgacccgacgtagcacaaataaatgaccttggaaccctgagtatcagcaataatcctgatagtttggagatagtcataccaggagtacaatggtttgagaaaccgagattgtgttggaagggcttggcttcgatgacagtatctttggttggatgtttaatgctgctgaataaagcccccagccgccaggacatgagcccttggtagcctccgaatacgaggattcacagaacctgccaatagccatgcaaacgaagattctggatatctgaaaccggtgcatctcgctctggaagctgaaccacggtgatagtggcgagagcttacatatctctgaatagtcggattgcaaggtggggatatggagaaacggatattgggggtgtatgtctctgcaaaagacatcaaaacagctggcccattcagcttgattgataagttgcggatcaaggtcgggaaacaaactttctcccggatccatccaatgatcgacctcgggggaacaagattgtagacttgacaaaatcgtagatgggggcgataatataatctcttcagacccaaggaggctctttttgttagacctggcgcatgtagccttcaataatcgttcagcagtctcttcgattggagttttctttcttctcctattgggctttgcttgacagcttcgtccttgaagtagacacggcgcacagggaatgttgccatcacactataccgacgttgagtgactttgtctcgtgaggtattatcttgtgtgggggcttaccttggactttcggcgagcgcaggatttgctgaagaggtcagcttctcgaatcaatctacgttttgattttgatcaacttgccacgctcttgggactcttgttcgaaacttctccttgccctccttcttttttgcacggtcttttcgattcaaaatttgcttgtcagctataatatcgtttgccagtatgccttcttgatcaggcatattggtgttgacatgacaatcgctgtatatgtccggcggtgtattcattgctgccgtacggagttctccgtaggtgataagttgatctcgaattttgcgctaatagagctaggcggatcaaagtgaaataacgtacttcaagcatttagcctttcgaaattttatcatgatacctagatctcaaacaagtcactgatttagacctattcacccttgtaatgcggccgttcggataaagtggcggccggagccacattatacggcaatgggtaccacattgattttgtccgtggttgcaagcaagcaaggaacgcctatttgatgaagctactggagggagcttccaccggaagaaaaaggggttgatttctgctaccgagagagagagacgaagaagggaaaagcaaagagagggagagagcgagctatctagagaacacatggtcacctgacccgatgttcacaacagtattcgtggccttcaaggctagtgagaagattcattatctacaagcgatactagtccagtaagcgacgcgggcacaattgcgcaagagagatgaaggggagggtggcggggtttccagacctcgggatacaaggcctgcagtcacctgatgagtccgggtcgtccacgggtggatcgacaaagatctacaaggtgtagtctccttcaagacagatgatcattgaatcgttactgcagaaacatgcggactgcacagcagtccctggcctaaaacctccgtgttgacgcatcccacggacttgatttcacataaactcaaacattataactgcactagcgtcatagagtgcctatgtatgtatttctcgaactgccagagcagtgcaagaaagcccgtgtgcaatgttgaacccgagtttgttcgccaatgtaaagagcctgcccaggtgcagggtcacgcgtgtagcgtcatctttagtggcaagaaattatgatcaataatcgctgcatcaatgcaagtacttagtttgatgactcggattcaacatcgagtttaaaaagtctctcgtacacacatatattccaaggttgttccgagggttcgattagctgggatccacaaggccgttatcaactcatatgttgagcgagtatctactccccgcgaatcatcagagggacaccagacaaaagtgttacgaaaagctgttttcagaaagtggcaaggttattctttgggagttctgttgaagctgcgtatcatgactcaaaaaagcccccaaattatgtacttgacaattgaaattgaaagagaatgagtgcaaaggaagtaagatttttagggccctggcatccatatactaggggatttgccctagctccttaaatttggtaaatgcgtcggtaaaagaatcaaaagaatccaaatgtccagtccaaccaaacttgcgagccttgttcatgcttagcggagcgctccatgtgcgctggaacacccagtcctggaacgcccaagtccccgcatcgaatgtagacttgctcccaggggatccgagcttatcgcagagcgcattccaaacttctcgcttgtctttggcccagtcttcgagattcacatccaggtgggtatcacctgcttcgaaactcgtcttggtgaagtgttggtccgatgatgcgtgggctccaaaccactcagccaaacgaggccacatgtatttccaattgaagaagtcgccattcgtgctgttgaaagcctgattggcacaatgctggtgggttgaggtaaaaatggacaaatcagcaatcagtcgagcatcagagatatcgtcggtgccattgaaataggcataattggttggcatcggtgactccctgccaagctctttgttgatcaagaaataaagagcaattgtcaacgcctcgttcatgccattgggcttggtagtgtagccaatgattgcttcggggcggatgacgttccagctccagctcgagccacgctgctgctcgaccaagaagtcttcctggtgataatagaagttctcctcggaggggataagccgagggtcatcttcacgcgctggccatggcacggatcgtagatgaacgttgtagtacttccctccagtttgaagggtgcaattctgcagtcccttcgacacagagatcaatgcactcagaaaattttcaaacaaagaccgattggccttgttcagttcggcgaagtcatccttgtgaacgtaggatgagaagtacgcatgggtgacatcggcacactgggcgcgcatttgttccacaagcgtttcggaggaattggaaaagtccaaggcgatgaactcaacgcgaggatctgacacagttgtcttcaagggagatctggaggtgatgatgatacgcgaccattcagaggtattgtatttgacaagatgctctagaatggcagagccagtgataccgttggcacctgtgatgagagcaactttagccatggtagaaagtcgatggatggtgggatacagaaacaggaaaatgatgttggggattttgagcgagacttatcggggacttgaaggattgatgacactcctttgacccacactttgatatcctgagcggtgcagagctagacccatcaccatgacagcaaaacatacccgggcacagcctaccgaccacatgggtagccacttgatcccgggtaacgtggcacagaggatctagtggtccggggccgtccggggccgtctggggtcgtctggggatggcagcgggtggcgcggaaaccggcacttgagggggcctgaatcccgcaacagggtgtgtcaatattctcctgcggcagaaatcatactaaaaatttccgatggggtctagagcgttgtactaaagaatctcgtacaaagtcttcactcatctgccttttccgcaccaaaagtgccttactttgaaccaacttatcttttcaactttatatggaaacttttttcttcaatattttcatttagattaaaattggtaaataaaaaaaaactcctacacacaattttattgtaaagtttcttgatagaaagcgattaattttcaaatccgagtgatggttaacatctaaagatttagtatgggcgcccacctggcacatatataattgacatttcggccacctctagcactttggtcactaaccattgaatcattaatcttacaatgatattcggaaagacatattgtgttaattaagtagttagaacttacttcatatatataaaaaaatgattacttcatattttacaaaaaatacggccgtgaaaaaaaggctatttttggtgggaaaccggcgatgggtaaagacttattaacgggtagtgattgagaacatttcgccatagcaatgaaagcgactattgcctgccggagtactccgtatgtctagaatcctaggatcttttgtagtacacaccggagctgctcctcggagctttcactgcgatggggataacgccaagcgacaaagtgatccggcctcaccaaaacaacgccgtcttcatccactccccgaatgtgggcccattctcgataacaatcgagataatctcccccaaagccaattttgtagccaacaatatcaatcccccaagacgacgcagccaacgatttggcagcagagatccaatcatcaccacctacgccggtgaacaacgtaaaccgcccttgccctgccagatcaagtgtggactgcctaggactttgaccatccttagcgagccagacgtgaggaagatggtagccaggataggttgagatcttcaagtccttaattgaatcaagtgaggtgaaagaaggagcgatatcatcagcctctgcaatcacaccgggagaatcactgtagatttgattcatttggattcccagtgcttgaacttctgcatcaattgcctcgagagcatttgaccaatcttcacgctttgagcgcccggcactgctatcttctccaagtagcgccagagccttggcgcggtcagctggtgtcagtccgatgacggaccacagggttcgatgagcttccatcccagtgttggctcgatggacgatgttgtctccaacaggctttctctccctacccagagattccaacagggcaggcttagcgattcccttcagaacataagccaatttccaagcaaggttgaaagcatcggacaggcaagtattacttcccagaccattgatcggaggatgacgatggactgcatctccaatgcataaaacgcggttcttctgccagtaatcggcgacttggtcattgatggtccattcaaatgtcgaaaggaccttgatcggcactgtatttgtgccgatcatctgatgcaaacggttgatcacatcctcctcggttggttcaaatcgtgctccatccttggcggcaggatgcatggagacaacccactccgtccaaggacgtaccattcggaagttcccaacagcagaccaatctggcgcctccgtgttgagaatccaattcagactaccgggacgatgggagatgtatttggtcagatcagcctgaatgtgcacattaaaggcagtattgacttgtcttccggagattggaattgccaaggcattcacaacagaacttcgagctccatctgctccaaccagataagacgagcgtacagtatatgtgatatctgtgtttcggtcgcgcagagtggttgaaacgcctgaatcattctgatcgagcccgatgaaatcagtgtagaaacggaattcagcccccagcttcttggcttcttcaacgagaatcggttccaaatgagactgaggaagatcgctcatgcgacaggggcttgcaagctcatactcgcccttttgcttgggtttgtttccccacgcccaaaggcggccatattcttggccagtgagcttgtccagaaaagaggagtgcgccatgtctacgtcctgtcagtcatttgaaacaaataaactagcagatagataaaaagacctacgctccattgagctagcgctctcatagcattgatcttctattccggcatctcgaaggacttccattgcacgttgattgaaaatgtgggcgcggggcgtattagcagttccccgatgacgagagatgaccagggacttgatgcccaatcgacccagatgaagagcagcagtggcgcctgaggggcctgtgccaatgatcacaaccgggaaatccatagtgtttttcaataactcaagtggttcagtaagatgtagttggttgtcctcaataatgcgggagagctctcaaaaagaaaattatgattggtgacgacactctcttttacctttcacaagaggctctctgatgcttcttcaatatgattccatccccatgaaagattatgtacttggaacgccgcactcaaagccgacggaaccggcaatcggaaagatcattggagatgccactttatccggtcaaagaccgcccggagcaagtggccaaggagctgtggggaagattggttgcgatagcaaaggtgacttgaatcgaggagactggagtgagagattcggtagttataagagcctgtctttggagtgcatagatgtatgttttgggacaaagtcgttggctgaagcgacatttacaaacatgatcctcacacaacttcaaagtctcaccgaagacgctctgtattcgctactgcgccagccgctgaaatggctggctggcttgttggggttgtatcttctacacactgtaggttttcggactgcctgatctcctgacccatctgacttgttctcagcttgcttatgcattcctgctctctcccgtgaagcatgtaccggggccttggtgggcccgggtatcaaagattcctcttttatatgcaactttccagcgacgtcggtcgaggtatgcatcggatctactccgccaatatggccgagtggtggttatcgctccggaccaggttcatacaaccgacgaggccgccatgaagataatttatgcaaaatcatcgatcaagacgcgtttctacgcgggaatgggctcctggaaaggtgtcaagtctactcttggctttacagactatagcagtgccgcacccaccagaaacaacctcatccaatgctttcagaatcgcaatcttgacacgctcgtggacagcatggccttccatatcactgagttctgcaacttgctcaaaccaaaagtttcgaacaaggaaactgtggatggtgtcgttgtctttcgcctcctagctctcgatattgtcaccgacattctttggggagaaaagaacacactttgctccaagtccgccgaccaaatgcccgtattccttcgtcggttccatgctttcagctcttggaatgcaatgaaatccttcattcccggtctggacacgtgtgttcgctttttcggctcttcaaccatgcgtcaattgcgatcagactgtaatgatatggatatcacagcacgcgacgcactcgagcgatggaacgctcgtcccgactcccgccaccagaaggatgttctgagcatgctgcaggcaatgaataattccgaggacgctcggaaacgcattccgaacgatcacattccagcttatatggttgagatgcttgcagcgggtagctctaccacatcccacaccgctgccttcgcttgcgacctacttgctcgccacccaaaggcacttcaagcacttcaagaagagttgattgagacgttccccaacaaagatgatatcaatgagcgcaaaatgctgtcacttggctttttggaaggcgtcatatacgagacgatgcgcctctatcccatgatcccaggtccccttgagagacatctcggcgagtggattgacgtcgatgggttaaagatcgccccgggagtcattgcctcgactgccgcatatgatcaagggcgtatcgctgaagtatatccgtcaccagagcagtggaagcctgaacgctggcttgaggctaccgaccgtatgaagttgaattggaccccctttggccatggctgccggtcgtgtcctggggcaaaccttgctatcacagagctcaagtatatcattgggacgctcctcaggcgctttaccgtgcgactccccgaggactaccccaatgatcctttagatcttgcggatgttttcgccgcaggctcaacgacagggcattgttggttactctttgaagagatgaagacctgatatggattgcgatatattggattcagaccactcagtcattcgatatttcaacgctgaaggatacataccggacttgcttcttcgtttgtgccttcaatctcggactctaccctgctcaggtaaataaacaattagcaaaacaattcttttctaccaaatagattcttctttttgagacgatctcaacgttgatcttgatccgcgaaactacctcgttgaggataaagattgttcttccgaaaaaggacaggcagttgaattattagtttaaaaaccgtcaaagcttcccctgccatggcatgagactaaaaaccttggaataggcaactgtttacgtaaattccgaagatatttctctcgagattgttggtgttgtttgcgagttgaaaggggtgagcctcagaggtgacctctgctttgtgctagcaaaaaatgggcaacatgcaggcgatatggattgtgatgaagctactggaagggagcttctaccggaagaagaaggttgatttctgctgccgagagagagagacgaagaagggaaaagcaaagagagggagagagcgagctatctagagtaggcctcgccaaaacccgcccaccgcccaaacccgcccaccaaaacccaacccgtgggttgggttgggtcttagtcagcaggcccgtgggcgggttgtcttctggcaaacccaacccaagacccaaatgggtaccctgtataaccccaaaaagcaaaaaaggttgacatatcattttacattaaattgtgcagtaattttcgattatatcatggtattcctattgtctatttaactaggtgtctttgtctacagcttaaatgtacttggaacaaacaccattagcgaagaaatatgagattagcttataataaggaagactaatatatctcgtatccttacagtcgacttaaaggcattgtgaccctaccagaagatctcttctggcttctatcacctaattgcgtgattggaggtgaaagcaaatcagcttcatcgtcttcatccacctctccctcctccatctcctcttcgtctccttccacgtcgtacgtctggttgtgcattgaaggctactaagcctctgccaatataccttcgacctagtataatgcttcgggttcgatattactctcgacatcttcagtctcttcaaccttattatcgtcgctgatcggcgtagcatcctcttcatttgctctcagcgcttcatcctcttcaagtgcctcttgactctcgccctctatcggcttctctaggcgagtcaactactatccctctagggtgaatttctctaagcacatatatatcatcaaatcttaaataatcgcttcataaagagatcctcgacgataatagcagatatctcgcgcactattaaaaagccgttctacgcccgcgccggtcactagaaccgaagtaagtcgcgtgcaagccgagaaagcactaggaattcgcgcttatattctctccaatacagccgtagtagaacgggaacatttgctattagaaaatcagttagtcgtctaagtctagtatactagttgccgtaccttctctaaggtactaatctatctcgtcattctctatccctttatagagcataaaatcatcaactagtttaagcagccaatcaagttacgaactctatagtgcggaagcacgatatactatacgaagtaatagctcggggttttgttgttaatactacgtaaaacatattcttaagtattcatagtacctttttaaagtatccttatagcaagtggaatactccctatcatcaaaagcagatagtttatattacggagcaagtagagttcccgtgccgtagagaaaaccgtggtcgcgatatatcttctcatagtactctttcagtttctgccttatagcaagtagcgcggtatatatatccttcttctaaggtgtcgtctttttcttcaattttcgattagaccgttcaatatactaaagaagtttcctatatataaggaacacgctataaattgtaacatctttagtcttcattagagccatagtgaaccgaaagaatggtttagtcaagtggaccaggtagtcaatctatcgctattcaacatcagtaaccttaaactaagagtattcataatcgtagcagtatttgtcgataatatttcgtagtcgacgcgcacgacgaagcattagaaacgtggaattccaacgtgtttgaacattatacaacggaaatagccgggtaccgcctaattaaagacatagaaatgcatctcgctattaggggcttatattaataaacaccgcaaataatcgaatctgtcttaataagtatctgtctatattaacagtcgtataaagactcgaggctcacctttactagggcataagccacgtccctatgatttaccgagtcccttaaaccgatagcttaggtattagaccaaaaaatctttatatctttattcttaggcgctactctaatatgccctaaaagctattttaggcaaagctagatcacataggctatacaaggaaccctaacaatagattccctcgagccaatcgcgctagtggagatcagtttttcctacaaagcgcggatcaaggtctcattattagtcgcattatctattgtaacgctaaagatacgatctaagagtttgcgttccttcagtaactaatagagaacatcgctaagattaatccctatataagtaccgtataacggttcaaagccaaggagcatttcccggtaattctaagttttgtcgataaagtagactataattgctataaatgcttgctagaataggctagtctaacaatctaaagcgagtgacaccttagcatcttcaggcagatctagtaactacgactcttattaaaccgtaaccgcatcccgaagccgtcttcgcagagtttttgctaacggaagttctagtgtcctaggtctagagtataagaggttaagcagtctctagaatatagggttctccactatttaaaatagcaaccgaagacaagtgatagttttcaatagttgctcctaaagttagaatgctattactctatacccactaagtgactccctaagggaatgtttttataacgaatccgagatctgagattaataagatcctcttttctttcccttacgacaagatttggacttttagtgtctacttatagcgcttatcccgttctttttgtactacaggtggttaagcagagtaaggcaggcttagcagaagactcgtaggaggccagaatctatatcggctacttagtcaaagtgtttctaaacgtcggcgtgacgcgactcagtagaccatttgatttaggactaaccgcccccgttcagcttctagtcatactcggtttcctcccaccatcctaggaattctctctctagggccgactagtacaaaatccagttctttctacgttaaggtcccatacgttttagcgtcgccggaggtcttcgactggttatatcgtagctctcgcgggatccagtgaaaggctataggccgtcttagtataccggtggtaagtcctgcgacagctaaggtgatggcggcaacgagaacagggacagagaaagactgtattcgctatctgacagatgactgggggaggaagaaggaagagaggaagacagacagagagagagctggagacaaacaaacagataggcatgactagcctgaacaaacaggcagccagccaggtcacatgacccaggctccaacaccccccctcaggctagacatccaccaacaaacactctcctcgcccccccataacaaaaagaaaactactatctccagtatcaaattcaccaccagtatcacatccagtatcacttctttccatcctttgcatccttcttctccattcgtgctatagcgtagcaccagatctccgggaacggctcccatccatcaaaaacgaattcttccatcaggtggaagcatgcctttatagggtgtccatcgagacggcagtgtgtgcactcagttccgttgatatactgaggctgctgacaacgctagcgctcagcccattcgtcaatgtcagctcctttcgggggtgctccacgaagctgcttctcttccggttcatcctttacttcacctttatcatcaactttgttatcttccttcggtttccgccagtcatttccacgtccaatacggcctccacgaccgcgctatccacgtccgccgcgtaaagaagacgagggtgacgaagaacgggttgtcttcgccagaccagggcttgtctcctccgtagttatattcgactcaataatcagctctttacagtattcaccaaagtcattcatcgtggtttcggtcgggacttggcgtttcagagtatcaaaagtgaaattcacgctcgggagctcttcacgaagtgcgtgaagcatagtgtaaagtgcagcaaaagggtgcggtacgacaccgtaacgtccgagaatattgaattgcctctaataagccataatatagtccttcgccgtagtgtaattctctcgtttcaatttgtcgaatttcaagacctccgcaccgacgttcaaaaccttattatcaccgctcacaatccgggtgatctccttcatcaagtcatcggcgtactccgggaattattaaattgaaccttcgaggatagtcgtgatttcattatctagtgtcgacgagatccagccgagggtgtagacggaccagtaataccaggtatcgtactccgggtcgtcttcctttggtttcggcaggttgaaattcacaacgttctcgatccgggtcatccgtagtccattcgtgatttcgcgcttccagcgcacaaagttcgatctatcaacgcgtaaggtgcaggctttcatccatttcacatcagttttctcactaaggcgggttccttgcgtaacaggttggggttagggtacagggagccgacgagagctctccccgcgggatccagatccagatccagtgtcagacatcttcaaatcaggtttgcttccagcgaacactcgcgagcaggaaaaatcagggtatcaaggtttcgcttccaacggacaaatcgcgagcgagaaaaacaggggttgcttccagcgaacaatcgcgagcagggtatcgagtatcgaatgtttcgaggtttcgagggttcgcttccaacggacaaatcgcgagcgagaaaggtcaagggtgctaccagcgaacaatcgcgagcaaaannnnnnnnnnnnnnnnnnnnnnnnnnnnnnnnnnnnnnnnnnnnnnnnnnnnnnnnnnnnnnnnnnnnnnnnnnnnnnnnnnnnnnnnnnnnnnnnnnnnacagtcgcgagctaatctccgagaaaaagtggggccgtgaaaactctgcagatcagatcagatttccacgtggggtgtcgcacaaatgacgtcaccaaagcagcaaaagcatcagctttatcaaccagagataaaaactgatagagtctcagttaggaaaaagcgagggctcagaacctgatggcggcaacgagaacagggacagagaaagactgtattcgctatctgacagatgactgggggaggaagaaggaagagaggaagacagacagagagagagctggagacaaacaaacagacaggcatgactagcctgaacaaacaggcagccagccaggtcacatgacccaggctccaacataaggacacgaaggagggaatttattctcatacagaagattgaatgtccgagtctaagaaaacgtcagacaatggctcaatagagagtagaggattaaaagcctgatacatggatcgcgatgacgaggaggaagaagacgccatattgatagtccataatcagggttgaaaattaatttctttatcttgagtgcttaaacgtagattttgttgaagtcgcgttgtgcgtttggatctatctattcgtgagtcgcgtaaacccgcgggtgctcaaaacccaacccaacccaaacccgcgcgacttaacgaggacgctgaaaatatcacaagtcgctagtttagttcgtcatgtctaaaattctagagaacagctatggtcacctgacccgggtgtttacaacagattgtgatggggaaaacatctctatggagggagacattcaagaacagaccagtagaccgattcaagcatggctagaacatttattatcgtctgtgctcgggaggataaacatatgagccagagtagaaagtgaattgaccaatcgaatgcaacgcaggcatgaattctctaaatggctccccccaggcgccgaaaagatgatttgggttgcagcctttcttgtcggaggaatggcctgctgcacaatctgatagagagatctcttccatagaagtgtatgttcatttggatactctaacactatataagcggagcctcagcaaagcgaactttatgtctcaaactccataatgttgcgcagggtgccaatattctctatttccacactaacttcatcaccgtctttcaaaaagatagatggcttcatgaagagcccaactccgcccggtgttccggtcatgataagagaacctctctgcaaagtctgtccttgactgcagaaagcgacaagtttgcgcaccccgaaacacaaatctgaagtgtgactatcctgacgaacctgtccgtttaccaaagttcggagagacaggttatccgcttcgccgagttgatcttgtcgaaccacagaagggccgagtggagcatatttgtcgaaggacttgctgaatccccactggggcacggggccggcttttccagcctcacgttgccaatcgcgagcggaaacatcattgccgacggtgtagccgagaacatgatccagagcgttggcctcggagatgttcttgccctcacggccaatgacaatcacgagttcgccttcgtagtcgcactgctcctgtgcaattctggggatgggaacggggacatcgtgatcagccactgctggtccaggcttagtgaaaactgtcgggcaagtgggtaaaggtctgccggtctcaagtactgagtcatgttagccccgtagctctgaggaggagaagatattcaagtacttactatgtgtcttatagttcagaccgatgcatcgtattatgggaacgtccttgggctccagcggaccatacagatgaaataccgtctcggtggcgtccgacttgctcagctggaatggatcattgcccaaaagctgcctgacttgcagcttgccttgcttggccagttgtccgagatcagcatttgcggtggaaatcggctcgccatacttgatgggaccgtccgcgctcgagctgtagcggacgagtcgagtccaaggaacattgatagctgacattgcggccaagggtctcactaagtaaagcaaaagtcaagtaagtttgcgtactcatccaggtagtggtgcttgcatatggtaatttgtaccccgacaaaaccacattatccgtcccggaccccgtgggaccccggcctcctcaccgacacatcaccatgccacattaaccggatgaacgtcatgtttgtgtcttgcacgccatataatgaaagctgaagcagggttgtgggttatgattgtggctttcattctcgctgtcactttgcactcactttaactacattttcaagctcttgtcctcgtccgcctctatgtccgtcccttcggatccacgggttcagcttctcaagaccgcgttcgtggtctacaatcatgcgaatctggagaaagccaaaagcttcctcttagattttgggcttgaggtggcctttgaaaggcccggcgaagagatattcttcaaagggtacggcacggagccatacgtctacgtggcccgcaaagccgaaacttcaagcttcggcggggcggcgtacgtggttgactcccccgaagagctccagaaagcgcagaagatccccggcgcaagtgctttggttcaattggagggtcaagtgggcggtggtcagcaggtcaccttgaccgatccatttggccaccaagtacatcttatctggggatggcaagagagaccaaagcagcccatgggccttgagaagttagtgatcaactatgaggatgagaaaccacgcaaaggtcgattccaaagattcaaaaatggcccggcgccggtgcatcgctggggccattatggagttacatatccagatggtcaatatgaagcaattcatgattggtatatgcggactttgagcctggcagtatcggacgtggtctacaaaggagatgatcctatcacctgtttcttccacatcgatagaggtctggagtatgcagaccaccacgcgttctttttcaagaaggccaaaccgacggaggatctcaacgtggcccatgccgcattcgaggttcatgacttcgacattcagcagctgggccacaattatttaacttcaaagggtcataagatttgttggggagttggccgggtatgctttccacgtttcaatctactggtatttgaacaggttactcatctttcccagcatgtcctcggcagtcaagtattcgactattggttcgatcctagtaactttgtcgtggtacgttcagctacgttcagccagactgtcttccataccctagctaacccagatacaggagcactatgctgatggtgatcttgtgaattgcgagacaccaattgctcatgtccaggctggacctgaagcattgtctgtatggggtcctcccttgccacaggttttctagacagttcatgttgaagacagacggtggtgaactctttgcaaatactctcaatgtcttgaatgatactgcaatgatgttccaaggtttgactcgactcgaggttcactttcaagtttgtctttatttcgtgcgatcgactttgtacaggatgctgtgggacgaataaatatccacgatgttttctttcaaattgtttcctgaatacacctcggaagcagtgttggtgaatgattataaagccttcaaatgtagaaagtataagtgaacagagggaaagacctggtgttgtgagaccttccaaggttgatatatgtcgaaggcatcgaattgccagaaactctcggaatttaggaagcaatagataccgaatacttgatggcaaagtaccccaagactctttccaagatgacaaggcagtgctaatagaatctaatgaaattaagatggaaggggaaattggaagatcaatacgatacctagacctggcacttacgcgtcagtgaacccgaagagcctagccatggaacctgaacctccagctgggcgtgaggactatgcggcactgaatctatcgaccgtcaagctttctcgctttagtttttgcaccttgttgagtccctttctagcactccacgcgacagtttacgtgacttacatcctatttaatccgcttcgacttcccatagctagtatcaagccagcatttaacgaatttcgcagtcaattctaatctatagacgatgggtctgttgatacagtcgggttcgattcgcggaaggttgtttggggcctcagatgccacgcgagatcgatggtctagaaggtctggaaggtctggaactgattgatgaattgggatagggaatcttcagagacaaggcactgtagcgcgtctaatggcaacccagtgtcgaagcttattgccagagaaaggggcaataagagaacaagagcctcgtacttttccaggtctttgttgccagttacatctgccaaaccaatgcggcttcttatttcagcaagctcatcactttccaagatagattcttcaatcccagcgggcagttgaccaggcaaaccacgttcatagaattgcttatagccttggaagtattcgatatggcgatcgtctttctcctcgtcaaggacacaagccatagtatctatggacaaacagtggggcatatagctcgtttcataggtttttccgtctttatagccgtatagttataagactaatgctaagccgtatcgacctatcaaatgtgagtttttatcccaagaattgtaggtaattagaaggttactatcgactttcttcctaagcgctcgatagatatcatgaattttcggaactttggaataattcgctttcctaaagttttggcgaagaaagtaacagaatctttctatcgttaacgttaaatcctacaccccctacgtagtcacgttccggaatataggcttctctaacgcgttatacctctagcgtagggggattttatcctccccttcgagtagccgtagttaggctaaatctttaagggtgttgattccgtaaagtgtgccttggttgatactaatgctagtaagaagtagtcctaatgcgaattgaggcctactataatcacggatgcctatactaaagctatagggcgagttagcgtttacgaaagaaaaggataaagcggcacactttaggaacgaacgtattgacttatatagtgtactccgggtctctattatttttaagccactattgattgactcgctacctaatattctatggcttattagaagaattagaacgaaataagacgaggtctatatactattaggtattagtagcctaatagaatatatatatagggttaatataccttatagcgaagacccctttagtgctaatgtctatttctagggataaacgctctaacccttataccggtgaaaagataaagctatagggcgaataaaagaaaaacttttattgttctatagataaatacgggattatcgaccgtctatattaaagatacggtgttattatagtctgtcttagtgaaattaaacttttctttttctattttcacgataactttttatttagttagagttcctttaatccactataatagggttagcctaaacacctagagcattcgtaaaatagactatactaaccccgtaaatctccgaacgatccgctttagcaattatatttcctatagctatcttaaagctaccgaaaagtctctcggcgtatactatagtagtgaccactataggccttctatctaggtcgaggcgcctattagtagaatgtatataccactaaataaattctttgattagagtaatttcgggcaccgggcttcccttttctagcttataactattagatactcttccactttcaatcaaaaacctaaaaagttaataaagaaggaaattggtgaaaagcgttacgaggccactcactcgatctagagctcgacatactataggtgaatggcattagacttatcggtacgtttatacttaccacgtgtagcatcgtcctctcggtgggcttccggttagaatctagtttctttacgtctcgcacggcgccgttcctttgctaaatcgtaagtccggtgttttatactataatctaggattggaaagggacgctatacgctaggacggagtataaagtgaacgagaaagagatagtgaactatagatttctataatcgactattctcgggggagtatcgctatatttatagcttgactggatattagatacctcgaggaaatcatcctagctatctatttagtgcgttattatcttctagcggctatcttgtaaaatacacttgctaatataggggcaatcgataaaaaggatggattgtttaaaaaggcttttagttgctggcgctagcatcacggaatagatgggtgaaaactgatccacttatcacgtgatagattcggccttttttctcgggcggcaagatgagaatgtctgtgcgctcactaagcgtagtctgagtacttagtgagcaagacctgagtgctgactgagcataccctaagcgctcactaagcaatatttggacattactaagcataccctgagcgctcactgagcgaacctgagtgctcactaagcagtcaccctatactgtaaaatacccagtgagcaggaccctgagcgccctcataaagcggcggcaccccgatcgggaaattcgtatccgcggcctaaaatctggtacatacaggtacatacatgtacctacatgtaggtatgtacatatatgtatgtatcggtctcgtctccgacgtgttgcttgtactccgtcgggcggatgatgaacatgtgaaatgttgaatgtgactgatttccacttcaaaaaagtgggagataaccttagattgacctttagtccgttaatttattcgactttgaatgatatatcaaatggctcttctatcccttctgctttcgccatgggctataatcctggccatccccgtgtgggtcgctctctactacatatacccttatctagtatcgtatgggcacttaagtcgagttccgggcccttttgttgccaaattcagcaacatatgggtcggattaagcgccaaacgtggccagaaatatgccgcagtcgacgcggcgcaccgaaaatacggcaaggtcatccgtattggcttcaaccatgtgtccatcgccgatgaacgggcactgaacgttgtttacggccacggaaacggcttcctcaaggagtaagtcatgctttctacccgggttgggatcttttaacgctaacgaaaaatgtctagtcactattatgaagccttcgtggcgcgaaccccgggcatgttcaatgttcgcgaccgcgccgaacacacgcgaaaacggaagattatatcccacgccttctctcccaggtcggtcgccgagttcgaacccatcatggcggaaaacctacaccgatggataaaccagctagaccggatcgcggcttctcagccgcaacgcaatgggaaggaatttgctcgatataacgcgatgccctggctcagctaccttgcctttgacataatcggagacctggcatttggttcaccgtttggaatggtaaacaagggcaaagacgagactgagacccagctcgtgtctggaggacccatttcatatactccggcggttgatgtgttgaatagacgaggcgaggtctcttcgacgctgggtctcctcccagcactgcgtccatgggctcggtaccttcctgatccgtttttcaccaaaggcatagcggccgtggagaacctgacggggattgctgtcgccgctgtcgcgtcacggctggatgctgcggagaagggaatggtcgactcgcgcaacgatattctttcgcgcttgttacaagcaaaggttgctaatggaaggccaatggagcgggatgagctcatagcagaggctctgacgcaacttatcgctggctcggacacaatatccaatacggcctgcgggatcttttactggatcctgcacggtgagcgcagtgcgccgggcacgataattcctcgtctgcaagaggagctagaccaagcaattggacctgaggcaaagattgcatcttattgtcaaatcaaaggtctcccattcctgcgaagatgtattgatgaggcgatgcgactgcattctacttcagctattggactgccacgtttggtcgctgaccatagcccgggtgtcgatctcgatggcttccatttcccccctgggacggtactttcggtaccctcatacactatccatcacatgaagaatatttggggagacgacgtcgaagaattcaagcctgaccgctggttgaacctgactgcgcgacagaaaactgctttcaacccattctcacatggcccccgggcatgtgtcggacagaacgttgccataatggagctgcagctgattattggaactttgtttcatcgatacgagttcgcattataccagccaatcatggaatcacacgaaggattctcgaaaaagcccaaggagtgccaggcaggtctcagattgagagaatacagttgatctcccgcactcccgaatgtatatatggatctgataggagtgaatgggttagatccacaatggcagcatgtcaatagttgtttaacgcaattcgtatcacattgccggagaacatgtcttcaagcgatggaaattcctgatcaataccccattcgttacaagcccaggactttgtagaaacctgagatgtctgcgccatatgaatctctgtgctattccctgctatcgaagtgacacaatcttcttgctcaaccctatctgcaacatattgcttcaaaatgtttagggaccaccggctcacaggctcggctttgcctccacattgaatatgagagacagccgttccatgagaacaattatgctgcccacatcatccaaatgggctacgaactcagccagtgtcaccgtgacaaaggaacaaagcacgttttcgtaagcaggatggacataagtggtcaaatctgacatggagacaaataggattctgaaccattgcggtttgcatatgcctgcgcctacctgattctggcacgtcggacactccaacatatgaacgatacccaacctgaagaaacgacaacctcgagaactacaccagaggaatcaagcctcccgttaatccggttcgcgattaaccagtcgcatcaactcttgaatagataagcccaccaactctcgaacagcgaaaatcattgagcaaccttggcttgctatcacaccgataacttccactactccacttcaagtcttcaatccaacttagatgctttatcagatcccagatccaattcatcgtgttgtggcatggggtctagcagtaagataaattgaactaagtacaaaagactggagtatgtgtggggccagactttatatccgttgctgtgggtaatataaggaagggtctactcgggtataacatctaaaagtgagatctgctaggtggtatcgatttatcaacttgtttcgtgaaaatgaccaaatacatcactgcgtaaaatgcggcggcaccgccaaaccttagaagattaacctcaccaccgtcgatatccgataaaacacaaccaaactaactccaagccatttgccgaaccaaagaaaagaaggaactccagcttacaccgtattccctgctggatcgccgagaaaatattcagcgagcgttatgaacgttttggatgccgacgtccggtcggatacttcgtacagctcagaagagcgcacgacaagggattgtgatccctcatcgaaataggcctccaacacgcgtgcacgcttgccggccaatgagacgagtagaacctgtagaatacccagtcagcaacacacaaacatataatagaatagggaaagaggatcatgaagaattaccggtgctatattatggtgtagcaagcgaatctttctcaattgacccaacattaggcgaaggatgatcaagagctctccacgaaaacaagtttcattgtccgcctccaagtcgttgtatattactgctttgaaatgcggatattggcccccagcaacatctaccgtctcaaaagcaccaaatgcgggagcatcgtactgatacaagctcccgaaaggggtatagtcaccaggactatcgactagtgttagatatgatgagccgatagagatagctccaagtaagggtggacttactccttcgaacgccaaggcgcatcatcgaggaaatttacatcatggaaggcataagattcccagaagatatgagtggcatatgcttcttggtatgggtcttcagaagcagtaccatcagatgaaggccatgggtcaggtgcaaagaactcgtcgagtatcttatcgctgggttgcgggaggtagtcgtgtcttggtgcaaagaagtggggcttgagctccgagtttcgatcgagagtcatacggcagaggttgacgttcaattccttgagtcgagtcacgtcaagtttgtgcacatcaagattctcgatggaagactcaaggtcatgcaagagcttacgttgctcccagtgccgacttgtttcctgagcttcgttctttggagacatgtttcgtagacggatttgaatttgtatgatgatggatagcctgggagatgagtgatgaatttggacaaggacgactgaaacccgggcttttaagtcagatgcctagctaggatgaatgaaagaacaaacagtaagatggagtggagagtcaatgtgatggaatgtgacgagggaggattgctgagcgacacgcctgagcgctcagtaggcccgggcccctttgattttcgcttatataagtcaaacctgtgcaaaggtctcacaatctcctggctattcaaatgcaggagagcgcccaaatggtcgcttggatcaaaagcgacggcgacctagctcagcgtaccaacaccacgtatgttttatcccttctaagcgcaactacgagtactactaatatcacaataggcggtttcatatatctcaagatcgacatgaggtgttcgtgacagttgctaagtacaaccaggaatatctcgactacctgaacaataagctgcctttatctttgaaaggggactcatcattcttaactatgcaccaatatggtccatggaaaaccccaaataaatcgtccgtaacgaacctaggggcgatcatcttggcaatcaccttgcgagctgaggaggagatcaaaaacgagaagagagcagtatagtccgcacattatctcctgtacttatcatgcattgtttgagattccagacaaggcgattgtctgttactgtatgtttgtttctgttttggtatttatgcgcgttcatcgacacatctcctggcgtattgtagaaagtgcaattcacaacatcatgtatcacttcccaccaataaaaggttcatacatataatattcgttcatttcaactgaataacgccataagtcttggaaaaggatcaagacgaatatatctcacgtagctgaagttccgggcacttgaatttaggatcaagttccttctcaagcgacgcgtcaattgattgtccatgctgaagaaaccgagcgactttaacagcatccaagacaccacgcgaaagggcaaagatcttatccatctcctcgagactgcgcccggcagtctcgggaaacagataatagatgacaggtatcatcattgcattgcaacccgcgaaaatgacaaagtacgtctgccccatgctgttgaatgcaatgggtgtgaaagcagtgagtaaaatgctgactgcccaggatatgctgatgctgaagctgttgatagtcgtgcgtagatgcaagggcgcaatctccgcggcgtagagatatggtattgcgccaaatccaatgatgtagctgaaatgaaacaggaaaataaagaaaacagcaccccgcattgcgagtggattgtcagtttgggtcccgaggccagctactaaggccagacagaccacgtttccgattgcactgcctagaagcaatacacggcgaccaagtccgtcgatcttgaaaacacagacggccccgccaatgggaccgactagctgatagattgcagctagaactgtcgatgttgaattacccagcgaaagattgttttcgaagattgcggttgctaaaagcgcgcagcataagccactgcgatgtgtcgattcgccaggggagggataattcaaaatacgtactgtaaaaggtaatgactgtagagccagtgagctgtaagaataacatggccaaagcagcaatactagctcggtggaaagtcctttggggccccatgtggaatatttgaccaagtgacttttcctcaaacaagtccagcgacgtttggacatccttgattctcgttttcacagcttgatcatcaacgcatatatcttcgagagctgctagaacctcactagcctcacagagtcggccttgtcggacaagccaacggggagattctggtaacaggcagatgaacaccaagacagcaatggaaagcagcaccacaaacgcaaaaggaaatctccaggcgacgctgccttgcgtgaacgacattccaaagtcgagaaaaagggcaagggcacagccaaaaccactgaatatccccttcatgccaacatgagcaccacgcttgtcggcaggcgatatctcagattgccaaagagggatcgtggccagcaaaacaccagtacctaaaccgaggatgactcgagatgtagtgagttgggcgagggagcctgcgctagccataaaaacagctccaacggcctgcacgactgatccagccattattgtgcgtcgccggccaaatctgtcacctagccatatacacgagagggttccaaagaatccccctattgtgtaagaggccacaacaaggccttggattgtcgatgcatgtggtttatcaacggcagcagcaatgtcgatttctgggaattgttcttcaaagcttttcagtgtcaggactcccccaagtagtgaggcattgtagcctatcgtgaggatgccaggcatgagcaccccgagaatggctgctacatggaggccattgccacgaagcccaaggaagcgtggcatgtgtacgactgggtgaggaccggtgtaatataattataacggatcggcgggagtggggttaacgttgatcaacgggttgacgaggtctttttgcgagtcagactcatcaaccgctgccaacttggtgaatccctggcatttaaagaaactggggaccattgagacccggctatctcggctcgttggtaccaggctctatgcattccattcttttgcgcgtagtcttaatttccaccgaactcaagtaggatgtttaagccgtatgacacagaaggtagcatgcaaggttattgggctcattcttctgggctggctttaggacccagagcttccaatggccaggccggggatatttggagaagtgaacgaaaaaggacaggacaggcccttgtgacagggccgaagaatgcacagaaagggagattaacaggagagaataaagaagtggtaagcggcctggtagaatagtcgaagaaaacccaaagtctggagtaaatggtactcaagagccgacgcaaggggaaaagctcccacataagggtctagacatctccaacgcaacgcgctgaatgcttgatgcgctacaacatacggcagatggaggaaatgggttatatatttgtatgttaatcgtaaaactgaataaaaatggaaaggaagatcggtttgttcataaaccacctattctgaccacttaaagtaaacaaatataacttcagaagcatacctatacatacacatgtaggtgctagatctcgatgatcgataaagcctaccgggccgaccctaaaggacgccattctctaagcttctgccctatcaaatccaccataaaagccgaaacttaatcccaaatgccaagggttgaggaattccaactttcatggaatgatactgtacaattcctttatatggcaccgtagcattttaaaaatgggaactatacgtatcgtggcaactccttccaggagcaaggagttatggaatagcttctgaagccaaagtctaagatagcaagtgttgacccaatcctctcccatccagctttaacaagggctagctcatgaaaataaaagaggtattatgcggaggtctattaacataaagctaaccagcacttgaggcaaagctaattgaccagatacccatcagggtaaacaaactccttgtgctcaatcgctctgctcgaccatggcacatcttcatccttccattgtgagtaaacagtttcctcaccagcgaccaattggtgaatgttacgcctggtgctgtataccatattccaggcctgctcttcatggaagtcagccgcgttgttgttctcaatatccgaatcccgagaagcggagccggcctttctatatgtaccaatcaagttggggaatggatcccagcattcaatcttgtgacgcccattagcacccgcgcacaattcactcagggcatcgtctaccggcttatccagatggtcgatggaaagagcggcaagaatgttccgagcgcccctggtcgtgaccgcatagccaaacatgcagcagcccatttccgcccgatagataaatcgcgtcgagtcctcggccaattctggatattgttgcttccacttttcggtgggtccaccccaggtggctcggtggtggacccttggaactgtggggtccatggggatagcgtagaagcttgtttcgtttgcgttcgggcccgaggcacacccgccgatccagaggagatcccaatctgttccgtaaggagcttctttggatacgtgatcggttcctttcaaagcgtgcagcccgcgcgcaaattcccccagctgggatttgaggctcacgtcccagtctgcgtcatcttccaagatcaaagctgtcgaatagtcattgcttataacactgttgtttcgatgttaaaacgtcagcattacctttggataccgagaatggggtgagactctacttgaccaatgcattcatgtgtgcacgccaacatgccaccacagtgggcttcacgcgtgaggggtccagaccctaagagatcatgagaaggttgtttggaatttattgaatgggcagcgtacatcaggcatggccttggaatgtaagtcatggggtcgcactccgtcgagccattccaccttgatgcctgatatcgaggctgctaatgtcaagaaatcgcgcttgtcggtccgctctttcatactgatggcatatatatgttcaaagtggactaaaagttcgttgagtcagcaaccaagtccagaagatggtagacaaggtctaaccccaagagtgttgttttggatatgttcgaagacactaccgcctaaggtgttccgagagagttcaggaatcgagatggaccatgttttatcgccaaagcttctgacaaaggccgtgcagagcagataagtagtaagggccgccacagcggccgtttggaggatttttctcctggcgatcatactgagaggcgtgaacaacaatgagaattaaggaggaaggtattcacaccacatcaccacattggaagggttcaagtcgtagtcaatcttctgaatgccacacaaatattactaaaaaaagcatttttcccctttacattcctcaagtgccgggcacagcttgctatgaatactatgaatgcatcgcgtgtccaaatgcggatgtgacatacacgtgatgtgggtccatgggtgttcgttgccttatttaccaggccgtaattggtccctacataactacctgggaagacaataaaccaccttcaaacccttactgtattaaagatgcatacctcgcatatcaatgcttacatatcagatatatgggttacaatctaggattgcttaaacatatcaaagtacctttaacgaatccatttcgtagccagctcttcgggcggcttgtcgggaattatccattcttagaccgggcccttgatcagatttacttagacttgactgtcattccgtgttgcaacaggggactttgcataattttggaccaattatgcatttttagagtggtctcctcgctcaaacgaacttcctcccctgtccgcatgatcatctccttctcgtacatctgtatggcctcggcacgttcctccatgatgaagttaccctgattccagaatgcctcaattgccttgcatgcagtgtaagcgtccttcatagcgtgattgagcccctggccacgctggtaagtcatcggatgggcagcatcacccgccagagttacccggccctgatgattatcccaccgatgctccgggagacttgggtcccagtttcgaagcttagcataccaggcctcgttatcgggagacatccactcaaaggcactgcgccaggggtcggcaaaccgacgggccaattccttctgatgtacggcgtgttctcgcacggttcgtgtattgacatagtcgcgcggttctggaaaggagatgtagtgggtaaagatccagttttctggatggtccatatcgtctccgtcatggatgttcatccacccacaataaccctcaggatgaggaccgacctggtgtaccggatggtggggatgggcacgtagaaacagggcgtgctcacgcgtatgtcgagtgaaacacatagttgcggcgtaatcaatcggtgtgactttggcggcttcttcgccaagcaacagtgtacgtgtggtcgagtgtggaccatcggtcgcaatgagaagactaccagtgacctctgtgtcgtccgtgaacttcgcagtgacatgttcgccggcaggggattgagtgatattacagagacgcttcccccaacgtacgtcgatgccttgaagcaacattgcccggaatttgtctcggcgcagacggtacactttggacgacttcagctctgtgatcagagctccactctcaccattgaccatgggaattttatcattgtgcgtggtcgggatgtgcgggtcaacctgcgcctgctcgagtccagccaaaatgtctgcgggtacgaggtattgcagtggctcgtagccccagtgcagtcctatactccagtttcgtttgcgagttggtgcttcttctttttcgaaaattaagaaagggatcccggcctgaagcatgtattgttagtgtgtattgctagtgtggtggacgaggcgcgaccgctatctcccacctttttcaatccatgggctagcgcgagaccagccgagcctaggtagatgtcagttatttgcgaggaatttcctgttttgaaatgggtcgggaaaaggaggaaggcttaccagcgccaacgatgaggacctttttacggtcgctgacagcaggttgagacgtgtttgggggtatatgagtcgtgctcttctccgtaccctcgtatttagtccgctcctcgggtgcattcatgacggcgatgataatacttctggaagagaatgtaaaactgtcaaggttcaattccaaaaatatatgtaacttcctgtcctgactcggaaatcatcgaaatatattgtcgggctactacaggctacgcaaccgcaaccgcaacaagcggtgtgatgcatctacggtgcagtagagcccaaagcaaggggcagagtacgcaatgccgagaaccacctgggcatgaaaccatgtgccgggataggcacgttaagtgtgcgatcattttgatattaagagaaaataccgtgtatccgcctcatttccccgccatgataaccaagcgctaaatccatcatatttaaatacgaatgccaaacggaaaacaaaaagtgagtctatctatcatccatctataaaaaaaggtacccaaaaagaagtcgtaacaaggctttaaatagcaaccgggccggcacccaatctatctttaggtccgatacccttgtgccgaacggaaacgataccaatgatcagcccaagcccagctaggccgacagagcaccagagaccggtagcgtattgttccgcgagaccatgtccttgctggatatcgacggcatcggtaacagccgcggagatagccaatgcaacgccagagccgatttggaatgcagtgttgagctggtttatgatgttagtatataaaagtggaagtgcaagaaaggaaaaacttaccatgccaccagcaaggctcttgacttcgaccggtacacttgtgagtaccacagtgctagtcgtgacgaagataaaagacacggatgagatactgataagggaggtggggagaacattgagccaactgcgagagttagtatagtttgatgcaaaaggaaatgaggatacatacaagcctgattcaggattagaagtcaaagcactcgagatgggagcgaccacagccagaaccagtcccataatgagaaggtgctttccattcatgaattcgaggagtttccctgttccaagagaaacaataaagccgatcgctcccataggcaagaagcgaagggccgtatcaccagccgaaagcttgtccacttcctgtgccataaggacaatataataaataacgttttggtaggtgccatagccagctgtgtataattagcactgctcgaagcacgagttcggaaaataggcaactcactgaaaccaataacccagagaccggcgaaattgcgaatcttccacaaagaaagcggcatgatagggttgctgacgtacttctcaaggattgtgaatccaacaagaagaccaactgccaagatcagcagcacaataatgaacggctggtcccagccgtaggttccaccgctggacaggacaaattggagcaggatcaggccagctgtcgacatcactgcgccaatgtagtccattctttcatgcttcttttcggaaggaacatcgcttgggaggacgataaagcccaagattcccaaagatccagtgatgataacaatcaggtagaagatgtatctccagcccaacgaagaggtcaagaaaccaccaaagatgagaccggtacagaagcccagggttcccgaggctccatagattgacagtgcacgggtgcgatcaacaccgctgaagtaggaactgatgatgccaatagcagatggcacagtcatcgcagctccaatgccttgaatgccacggaacaccgtaagttgaataaacgattggccaaatccaatggctagggtccatagagaaagccaggcaagacctagacagaggatcttctttcgtccatatctgggcaggttagcattatgccaaagtcttgagacaacggaaggaagagtcataccgatcagacaaagcaccggctaacaaaaggaagccaccaaacgacaaagtgtatgcagaaatcatccattgcaagtcggtactagacacgtcgaaatcctgttgaattgacgacagggcaatgttggcactcgtcatgaagacattgtctagaaactgagagccggaggtgacaagcaaaatcaaagaccctttccaagaagccaggcgaccgaattgatgcgggatcttctcaaaaataagggtatcctcgctcccagccggcgaagggagcatttgcgcaggtgtaacagcgcccgagaagtccggactagagattacattaggctcgattacttttggggcttccatggtgggtgtttcatcaccaccatgtgcctggtggccacgtggtcgactgaaatagtcgacaatgcccattgtgattgtgaaaacgaaatgaagatggaaacggatggccagggtagcattggtacctacttccagactaatatacgatttactatcaaactaaaaatcaaaatcttcaatcgatccagtttaaaaagtggagtgatgcctttcggattacccttttgagcaagatcttagaatggagcatgttctctcgggttacctctttgagatgggaagacccacgataaacccacgaggagtggagaggaggaatcactggccctgtcgtttagcacatgcgagttagtataggattatcgtgattaaaatgtggctctgataacgcaatgcatatgcatcgcggccctattgctcacaatttattgagccaacacatcaatggcgttttgagaatggctatcggctttggaatctacaattttgctactaaaaaacttaaaagttatcgggccgagcgctaagacccacggcatcccggtaggggctcgtaggccaactgggtgttttagggctactccaaggctggctttttcagaactatatgggcttataaaagtacctataagatttagctagtattttggattttcgcaaagggaatgttttctatctctactatttttggtaccgggtcaaaattcgggattcgccacgctgatttttcactctcccgccgcgacagctcatcccacattcatcatccactggctgtcttctagacctctggtccttccgagtggaggaccggtcttctcggccgtcgaaaatttaaaatctccctaattctccttttagcagtttgcatattctgtgctccatacggagtacgactctctaatggagcacgcgggttccactcatcctataacgtggccactgacgaatgatctctatttactggacttgtcaaattgatgaataatggataaactacggtatgccctggatcgcctttgccaagccaaacgtgggcaataggaacatttctctcctgtttttgccaagctgatcgccagtcaagcaaaagctctgaccaagatgaccagcatgatcaaccattgttgattggtagtgattatctgctatagttatctaaacgtctaaagtctttatggtggaagtataccatgttatagaattcgtacatgtgactcttactgtactatgatatgcttcagaaccacacacacacacatatttcaccttttgttatactaattcgctgttaccaggttgcaatattgtattatattctatatatacttctacataattgcaagggctctgcttcgtacaaaccagcaatgtactctgtcctccgtggtaatcatgaaatagatatctccgtgttagactaaatatatgtaagaactaggacgatgcatacttcaccgatattatgagtggagcagaaagccagagtcactgggtttaagatgaccacatacgaactttttaaaagcaaagcagaagctcatgactatgttgtatatccgaggcttctctcgtcagatagggctcggctatagttcaatgacgtcacgatgcaggccatgtgccaagccttcagggtcaccccccaagtggacatcactttggtctcttttgccaatcacaacgttttggaggatacttcacctccacatcgggagactgagaggaatccacaatgacgtacaatattatatatcgtcatagccctgcttttgacagggatcacataaaagccaacacatacaacatattggcttacacattggcttacagtcatgaattaatttacagacgggaagatcgacgatcgtggttcagcttcacctgccatgcgcgccacccgaatcttttgctggtaacacttcattgggcagtcatcaaacattttctatcggtgcccgacgtctcttccattgatattggaagaagcgcgaatcggcgcgaagaaatagatgactttcaatttcaatcaaaacgtctcggcacaacagctggccgacctcctaccgaacggcgtcgccatcctcagccaccgatatgaactggtctccgtgaatcgccggttccgtgaactcatcccgtgccccagcgtcaacttctccgagtgttggttacgttcggtccatccagacgactacgaccgggtgtctactgggtatcgggaggtcgcgagctccaaactaccgctacgtttcgaataccacacgcgtgacccggactcaatttggtgtgtcatgacattggatcgactggatgataaagatgtacaatgttttgggctaggcgatggtggtgtgtttatctgtacaatcgcagatatcactccggaaaaaaaggcggaacttctacagaggcaggctgcggaggaggcgcaggaacgcaagaagcaacaagaacgattcatcgatatgatcagtcacgaaattcgcaatcctctgtctgccattgtacattgcacggaggatattcaggaggccatctataacaagaaaccggatgaaatctcagtcacgagcatcaccgaggcaaccgagacaatcagtctctgcatcaggcatcaaaagaaaatagtcaatgatgttctcaccttttcaaaacttgacgcgtcgatgctgccgctttcgccacggaaggtccagccacagcgacatctcaccattccgatggcgatattccgaccagagctccgaaagcacggaatccgcttcgaatacaaggccgatgtttcctatgccgaatgcggcatcgattgggtcatggcagatctagatcgaatgggtcaggtgctcgttaacatactctcgaacgctatcaaattcaccgcgcaatcggagggccagcgatcgatccgagtctcagtgggtgcttcaatcgagcgtccgacttcgtacccgccaaacatcgtcttcttcgattcgggtgaatcagcactccgccaagacgggactaataattctgaatggggaaatggcgaagttgcgtatatcatggttgccgtcaaggactctggtattggggtcaccgagcaagcccagaaacggctctttgaacggttcaatcaggcaacgcccaaaaccgaaagcatctacggtggatctggccttggtctcaacgtgtgtaggaaactctgccacctacatggaggtgagattggcgtgagctccaaaaaatgccatggaagcacgtttgggttctttttcaaagtacgcagaacaaccaaggaagccggtgaaggggatcagagtttcgacgtttctacactcgacaaactctgtgttgatatcgagtcactgggaaatgaaatgcgcggtgtcaatgaaacgacagatgaaccccagatgtcggaaagccctcctgaagatatcatcttcgaggcacagcccggtggcccaaagggcgcagacacaattcgtaccggcagtatagcccgcgaggttgagaatgagaaggcccaggggggcgatcaaagtcctccagatgaagagaaactaaccggcgatggccagcgtattctcttggttgaggataacgtcatcaacaggcgaataatatcccgcaagttgagtacactgggttttaacatgtcggtggcgagcaatgggcaagaggctgtggaggcgaatagagataacccattcgactgcattctcatggaccagcagatgcccgtgatggatggaaaccgtgccgcgaaagcaattcgtgacattgaaaaggaaactggaggacatgtacccattctaggagtcaccgcgaatgtcagagacgcacaacaagaggaaatgattgatgctgggatggatgatatcatctacaagccttatgggactcatgagcttgttgaaaagatcaatcacttgctttctaaggaagggaacaccagggccatggcaggattgtgagtttttgtacattttgggcgcatgcgagatgtgtatttgtttgtacgatagcctgagagagatgaatgtaccaatatgataaacccgatttgtacaggttgacagtgctaaaactgtcttcacaaaggatatcatttcatcgtgaaagagtccgggcgaagaatctcagttatatcccgataactgcaaaggatggctctatgaacgttttgaaaacaccaacgggcatccatcctgagtcaagagtcagtaaaaggaacgatcgggacaataccagaaggtagtgtactaaccattggaaacagcgtagcaaaaactcgaatctcctctgatctgtccgtggcatgatgtttccagtcaagttccagagctgctttcccgatcataccagccatagacaacggcacgtactttcttgcgaggcaatcgtgcggaccggcaccaaataccagccaattcttggtcttggactctgcatccccggagatccaacgctcaggattgaaattatcggggttagggtaaacattcggatcgtgcaaagctggataacaggacgggatgatcatagcgcccttggggacggtatagttgggcgtgacagggaaatttttcgtcgcgagatatggtaccataataacaggtggacggtggcgcaagagctctttgataactgcattggtgtacgtgagcgactcgagcattggaagatcgaaggacttgttcttatcaccacctcgagcagccaggttttctcgacgcagtttatcgagcacgtcgggccgctgggcgaggatttggaatagccaagtcgtggcactgctcgacgcatcctgagaggcaaagaggaaagtgaacaatgtctctccgatttcctcattcgtgaactcgcggatcatgttcgttggcttctcggcatcagtatcccctgcggcgattctttcctggtagcgcttggattccatcatgtggaggacccagtggtctacgatgcacgttggcgtcactccagtcgccatgtttgccttgcatgcagctgcgcattttgaaaactcagcgtgcacagcgtcggcagttcgcttcccgagccagggcttggtgaatggaatgtacatcgacagaggcacgttgactaactcgagggcggctgtggcgaggtagaagtcgtctgcgatcttcttgaccgcggcctgggagatataatctccgaaaaacgtgcggcaagaaagtgcgcagttgatctcgcgaaacatggtcatgaattcctttggttgtcccttatttcccttgctggcagcaacgaatttgtcaaaataatgggccagaaccttctcttgcaccggtaggtatgtagccatggccctgttggtgaataggggagtcaaccccctgcggtactcggcgtgatctctaccctgaagaaagacccatgctttgtggcctaggatatccttggcgatcggtactatacatggctcagcgtatgctggtgacttgaacactttgtgcgctatgtctctgtcggaggctagaacgacaaatctatagtaagttgagttagtttgagtaatttgatgggatggaagagtctgatgacacgacaggtgttcgtgcttacttgtggaagaccgatacacagctaagtggtccactcgcccattgtgcaagatacccttcaaacctcgggtgcaaggcttgtataaatggacccatgagcggtatcttgagtggaggcccagctatagagccttttcgtttgatatacatcactagagactgatcagcaaattcttatggtcttgacggctctgcttaccctggtcatagactaatatggcaattagaaatgttactgcgtactgccagactgagaaactcgtcaaagaagccaagcagctttgaaacttgcggtggttggaaggccatatttgcggcagctcattctgagcgagggagatgttggacatctcaaaagccatgttggagttcataatggtagatggtatgggcaaatcaacaaactgacccttctttaaaagaggcaggaaatatctaggtagccctggagggaaggtttctttgtgatggcatgatatactgggatacccactttacccgattaggactagactccgatgccaagcaggggtaaagcggggtctagtcctcttttgatttgggctcgggacattaacctgaggtccacatataacggaataatcgccagggaagtccaacattgagccgacttctgtcaagacccaagtttgggaccttccaactctttgattcacatcgcgatcccaaaggcggtgtggggttccagcttgagctattcttagagcgaaaacattcccctctggatgtccacgaatatccattcacaatgcgccaatctctccgccggtcctgtgccgcatgtgccaggtcaaagtccagctgcgatctccgcacaccacgctgttctcgctgcattaagcggcaagtcgagtgcgcctatgcgaacgaaccttcgacggggccggcaacttccgggtggcagaatggggcatcaacaagcccattagatgaatccgggaccttaactaactacagattcggttctcttgatccttttgattcgtatccacagactagacttcctcgagaacacgttcaacgtctgatctacggctgtatgtaggcctccaataaagcgttgaggatgaatgcttagcttacccatttagtcctccacaaaatcgcgttccaatactaccctctcgaccttaatgccacttcaaacccgttcttggtctcttggtggccgcttgccctaggggatcctgccctatttcacgtctctcttcagacggcatgtcttgacgaagagctgctggcgcagaaagggtttcagacctctgaacttcttatggtagactcggtggctctactgcgacgcaaagttgagtacatgtcactggctgttcaagatgggactatgaactcagtcatcaccttggcaaccatcgaggtgagatactaccataagcaccctcttttctggctgttttataattcggaccaatccctcattatgtatgactcttagttcggcaaaggaaatataaaagttggtgaaatgcatgtcaacggattaaaaaggctggtcgacatgagaggtggcatcaacgcagtaaggcagacaagcccacttaccgcgaggatggtcagctggtaagccaagccccttctgcgaccaagaggactgctattgacatatcccaaagggtatcgatgctcatcatgggtcatcctcaattcgagacccaggatgacttcggcattggagatggcattcctcccatccccgaatggcagtttgactcaaccgcgctcgacaatcagtcacttaatgtcagcaccatcgaagtggactatgccgttaataatgtcttcaatcgtctgcgcaacatcttccagcgagcgcgcagtatacctttaccggccacacaacttcacgaccttacctgttttgtcatacaccgtctcctactctcggcgccagctacagcaatatcaccgtcatcaccgacgacggaatccattcgctatggaatcatactctacatgtttattgctcagggaccaacatattactcgcacgcagtcatacagaatacgattgtgatacgatttatggagcacctcgagcacctcgcgtcaacacgagtctatgagtcacttgatgtctggtttgctgcggtcggactggtggcttcggctggcacggctcatcacgggtggtttatgaagagggcacaagatatagctgctgctctacaactgggcaacttcggtgacaccctcacccacatcaagactgttttgtggctggagaaaccgcagagtgaagatctctttcgatctcattgggatactatcttcgatttcaaggatcaatcagtactaccggacctctcgatatcggtctcaccgtatagtagtagagtggaattcatatgaaatacagtttcattcgacagtttccatgggcagagcatgacttgtcaaaaagccttgatcattgaaatgatcttcattcatggcattatcataacaagcgttgcgacccaaaagaagatggctacctgtgagacgcgatcaaaccaaagctaattggtctgccaagtgggcgtttaatcagcaatcgtctgtcagggggatggtttttaccacgctaggggaagtgttacattgccatatctctttaggtatagcccagggccacaagtgtgaggtgtaacctgctaggcatgccacaactacacagccgtctaaggcccggtccccggccatgctatcacgccattgttagcgagcgcagaattacgcgatcgcttatttaattgagaccgctcattccgctgtcagttagacagtccagatgaccatgacaagcgtgttttccttaatggatactgtgctcccagaaggatccatttatttatgattgtggccaagatctccctacgtggccatgtccgcatatatacatgtatctagttagtagaggtaaggcgccgatacctcaacctgaaaccaaaggtgcgtgtacaaaacagaaaattgtgcgtgtgcaccaaatccagcccccaaattaggctgtttcagcgcgggccttcagatccctgtggaagatatcgaaatgggcacgcatctttttcccaagcagagaagggctcataatgaacgcaaggagacccttcagatcctccgtctgtgtgaaaacagtcgaagcaccatcgttggccggttcgatatggaatttatgcaagccagcaatggtagctacgggcgggccttgccaagaaaacaagctctcagtgttgtcctttggcattggtgagaatcttcagcttaagttctttttttttttgtttcaggggaagatggtttttctcaccttgacttcagcgacgaatttgaagttctcgatgttgacttcaattttgtcgcctgaggaaagttcctgtgaggtcttggtgctgtccttgagctcgatgctcttgagccattccgtatgccattccgggtattctgagaagttgaggagctggtagggcgagaactggtcagttcgtcctaccaagaatttgggattcagctgtacatacaatctcacgcactttggtgggcggcgcggctatttcgattgtgcttgtgatcatgaccattttgccggtggtgtggttagggaggttggatgcacgagaaaggggatataaatcaatggtgttcttatgggggaagtgcgtggatgtaggagagtgcatatccttgctgtatccatcgtggacttccccacccaacctcaacgcttcctcctctcgttggttattgtgtctcatcatatgtttatcatgcgttcctaaaaattaggaattaatattctgaaaaattgaatatgtttgagtctagttcgtctatcaacttgtaatgggatatggatcgaaatccaaccccaagatcatgtagcagtcatgagatggtcaataaggatgacgagtcatatatacataagagacgtgaaaaataaaacgtatatatatgcgcaatttcacatgcttcggataatgcacttgcatatccagatcaaagctcaataagtaggctcctgactgatcctactgacacgccgaccattgttctgctctctgtccgcagcaagcgtagaggcgaacttacttttcgcgcgaatctgcggtcccttccagtagaaaatatagataggagtcacaactagacaagaaagacacgccagaatggtgcttgcatactcgacatgccacttgttgccgatatttctgtacataggcgacgcgtacatcgccgagataccagcaagaagatcacgcgcgaaagcattaccaccagtcgcagaagcagagtagacgccataggaagcgaccatgtaatcaacagaggaaaggtagatggcatagtttgcgataccgacacagccggagaaaatcattgacccgatccagtgcacgtttttcgagtcgccgaaggacgtccaggcgaaaccaaatagaccgattggttcgagcggcgcgaggaagagaagccatttgagacggcgttcgggtgggatggcagcatcaccatgtctgagtcgaagcttttgatcgcgtatgaaccacgggaagtagctgaagtaggcaatgaagtaggcggcgttgattggaataatggcccacgcttgagcgagtgtaccgaagccccagccttgcttgtacacgatggcgaagctctcgaggaaggtgaagatcagagcatcggagaaaccggaaagaagagacagacagaggacaatgggctcgcgtagaagcatgtagaatggacgtgcccagatcctgccggcttctttgagggagacacggggtttcttgagctcgtttggtccgtagatgttcgggtcttctccggttttgcggcgacgcttggcttcgttatccatgataatagtggaacgactctcgggcatgaaaaagatgatgaactgggtaactgctccgaagatgagttgaatccaaaagaaccattgccagtcaaggactaaatatcaaacatagctgttagaaataggtcgaaaacggtacacgaggtaaaggaatggcttgcttacatcgcgcaattggtcctccaatgacaccaccaatactggtaccgatacaagaggacaaaacgatgaatgcgagagggaattgttgtgtttcaggctcatagatatcggcaatcagaccgagggtgacactgccaccagcagtagagagaccaccctaagtatcatgttagtttatcaaattgtgaaaacactagcttgtcaagggagaaaccaaccaatgcacgagcgacgacaaggctgccccagttgggcgcaagggctgcagggagttgccaaatgttgatcaagaacatggagagctgaaggataggccagcgaccgaattcctcggaccaaggagcccacagctcacaaccaatagaataagtaactaggtaagccatttggccagtgcgggcatgctgttcgctgatgtggaaagcctcggacaaacccttgacagcagccgggtagaccgaggtgttgaagttcatagaaacctgaacgaaggcgaccgcagccagataggtccatttcttccatcgtggccagcagtatcccaggatctcatagcattctctttccttcagctcgcgctttccgtcggagcgttctgtctcttttttctcgagtgcggcggataaatcgaccggggcgttggactcgctgtcggtgccattggcagatgacgatctactctcgctgtgaacagcttgagcttcttggtgctctgggttagacatcctgggatggagcaaagagtagagagaaaaggtttgtgaaccttctccaggtgttatatgtacaaacacggagcatgtacaaagtatgtgcagactttttcgtctactttcttgggcacgggctgaaaccggatttatagtggatctacactgcagggtggtggcgcccgtggcgtacaacgtagtatagattaagatataggcattgtgattttgatataatggaaggtattaaagatctcagcatttgtatcattatacagttaagtagttatattatccaccacatgtacaatcctccagtatggtagtgaatatctatgaagaaatagagaagaaaaaaagaaaaaaacccgaaaaaaagtgtcgatctgggcgatctgcccaagctcccttccttccttggcattccccacttactttgacgtcagagtacttcttctattgcccatctctgcatattcaatggatttgtagaatattccattcggattgccactcaaagacctggggaaattgataaagctacctatgaagtcattacgggttccaagggtggaataacgtgaaattagggatccacgaggacctacataaccaattataaccaatcagggaatatctatccctatctatgtcagccgggagatcttcgggcatgaaccgaattcgttcataactggtacacagacctccaggtgtccaaatctttagtgatcgttgctgataaatctgggtaaggtacaatatctgatactctcggccatactccatacaccgtacgtctactaagatagacctaccgaggtcgggaccaacatgacatcatcactttaactatgggcaactttgattgaagaccacacatgtgcatacttggagtccctactacttattgtttaaaagttaaataaacattcaatgaatttaccaaagagcctgggaaatcttggttgttagcatatcctagtatattggtgcattgacgcagtatattgcttttatgcagttacgtgagatttcactttgcgtctttgtttctttatcccaatgaagctatctagagttacatgtaagtaggtagcgatcatcattagctgtccccattattatcattacatactttggttgaattattttttcccctcctggtgaggactacgcgcagatattccggaatagcaacgaggcatgcgaaagggatagaacgaaaagagacaagatagtcgcgacacccggtcatgtgaggcatgtgatcaagacacctactttctgaacgcgacatgcgtggacttcacttccgcgacaagtcgcacgcacgcagggtttatggcatctccaaccgaggtctcatttacacgcttgcaaagctacagcagcttcatcatgcaagtccttgacatagccaggtttcgacgtcggatttcgggccacatcgacacgttttcgaatattttcttctgccacgatcgcatgcaatcctgtcatacaatacggaatctccacgacttcgatatggataaccctgatcgctacacatcgggacgatggcgttggaatgagaaggaacggctttctcgtcgccgtgtcgtttaacccggcagaactcgtcacaatcgtgactccggcgactgggtcaatttcctgcgccggactgcagaagctcccagaggggaatttcaacaaggcttttcttcttcgggtgaacgataggaaataattggttgcaaagcttccgaaacctgatggttggacctcaatactttacgacagccagtgaggtggcgacgatggactatgtgagagttgcttggttgtgttgctaagcactatatgatcctggggtctaacccttttttttgggctccaatatactcagtgtcccaaccccaatggattacccctggagcccctttaccgatgagattggagcccagaatatatctgaatatacgttggaataaaatacggcattattccactcgaccaacacaaaaaccacggttaatgtatatagcctaatggaggccatatcccagtttgacaatatattatggagcagagtcgggaatttgaacttaccaagctgtggaatgacacaccgggtcacgacacctgggcagacctcagactcttcagcagatcgctgggtttgagaaagcactcctatccacaccccgctggtcacgaagtaaccctttctgtcagtgcgcgtgcactggaagtgtttcatgtcatatatttaaccctattgtcacttccttgccgggtgagaccccatggaacgacttcctacatggaatgacttcaacggggtttacggccactatattttacgcttccgtctgggagtttcaactggccaggctggatgctcctctgatcatccaatttcacgagccccatccgcggggcaaactgcctttcagacttgctcgcttgtataggcgtatgctcaagctcaacagagcgtatagctagaccgcggaaacttttgccttgggtaagaaattatcttcaactgaggagtgagagtggactgggaagtgatccctgatttcactactttcccggcgcgacttgatgaagaatgttcaccatcctcttgcctcaaagcttccgtctaagtagctgctctgccctgcggcagtcagcaccaagacgcggacatggtccgcctccagaggtttatagagacgggctagatatcgtcggcgtggacagcagccaaggccacagcattttccagattgcaataatcgaatgcatcaagcacaccttccctaaatcgacgctattacgggtaatatcgttacccgggagcgctcaggcaggtgttgacttttcacacatctctccatacttatcaattttcatccttttgaacgttttttcatcaatcatgcttcctaggagccctcgtggacgtcctatagagtcttctagcacggccaggagtttactgatgcccgtgcgggactatgccgagcctgttgataccgttcctagactcgcttcgaagggtttccgggaatactgtggtattaaccccggcctataggacacagagctgtccgcggccgctcggatcgaacggtgggcaagggaaatgcgcgtgactctgggagacgcggagttgactgatacagacgaaatcgacattggtgatgtgagcctaagtacccagtcgtacacccagccaatcaccgagacacccgcagagccgctcttttcgtttaccctaccccgttaaaccagcaataccgtacgccagaggaaggagccgaggacgtggaaatcgcgcgcatggacctgcataagaatcgtatacaacctatataagtatgcaaatgcttcaatcaatgaaaatgtacgatctttcttgaccaaaatgcatgcttttttactatataaaccggaattcctagaccagtttgaggtctttgtcgggctaatttgcacaatttaaatccacatgaaaatgcagggttttactatgtatgccagaatcggaggctttgatacggggtatgaggttctacgagggggatgttggatgtctgagacgtcaccataggatagaacccagactgtttgcctgccctctctctctttctcctcttcgtccgtcgcaatacctacagtctgatcattcattgtgtcgtatctatatcaaataccctcacatatattccttgatattctgccatacacaacttcccccttgcgtattttgagaagctaggacctaagtcaaagctagaactaggaagctgagagggctagacatttatatcagctatgtatgacgtgagatgggcaacggacgggagatatttcgtcttacaaagtacagtgggaccacatattaccgccctgtataccgcctgcccgttatatagtgtgaggaataccgcttaggagttttagactggcagaactggcagaatttggagggcggtatatctgggtatgaagggttcgcccaatatggaggtcccactgtacacggaggggcaggaatctccacatacatacgaacgagtggaggtgctaacacgcgccagtgcgtttttttggtccacgggtccgctgatctccattatgtaatcaattcgggtggggggcctaagaggtagagcggtcagctcaatgaccatcccggagttataaagactagactggacacggaataaagaggtcagaacagatttgagacccaatatttaggccaactcctgctgatcggcatacgcatgcaaggaaaccatggcatctcccctgctctttctccttggagctctctccttcgtctttcgagtagccgcctctgatatctctactcttctccccactctttcctcgtccacagagatttattatcctagcgatgccaattggaccgacaccgtccagcgatggaccgcttgggaggaacccatcttctctctggccattaagcctgcctccgttgccgatttgcagacggtcgtacgttttatctctctagatgttcactctcccatttgaccgtataataccgcaggtcaaatacgctttcaagcataatgtcccctttttggccagtggtggtggccatggatatagtacctcttttggggctcttcaaaatggtctcaagattgatttgggcctgttcaatggcgtcactatcgatacagatcaggggactatgaccatcggtggctctactaaattctctcaagtggttggacctctcttcaaagctggaaaagagattcgtaaggattcacctcattcggtctcttgaccgtcttctctaacgcctttcgaacagaaattggctcctgcccttgcgtggggatggtgggcgctacccttggaggtggtgttggtagataccaaggccttcacggtctcatccttgatgctttgaagtcggtccagctcgtcacccctactggcgatctcatcactgtctctgcctcgcagaacgaagaccttttctggggccttcgtggcgctggattcaactatggcattgtcacctcggccacatacgaagtttacgacctgacaaacgacggcaatgtgtttcacgccgacttcatgttccctgccagcctcaacgaaacctttttcaacactctggccagttatataaccctgcctgccggtctgtccttgtatgcgttgtccatgaattatccttccataggagtaagttccctgtagaccaagaaaaacaggattaccatctgacccttccatttagcccgttatcctcctcaatgccgtctaccccggttccaagcaagaagggctcaatctaattgccccctttctcgacctgacctatattcaacgcaacatctccatgataaactgggatgcaatcaacgaagctgccggttttggactggtcacagaattctgcgccaagggccaaaagcacgatatgtgggccgctggcgtacgctccattgacgcaacgacacacatcgatttcttcaacaagctcgttcaattttggaatgactatccctctgcctcgggaagtgcctggcaggtggagtacttccccatccaggccgtcactgctattgcagatgactccactgcctatccgcaccgccaaatcagtgctcatgagtaagccttctctccctacttgcatggacatgcgaatctaggtacgcatctaacgcctgtctaggatgtttacatttagcgttgtcgatagctccatcggcgataaggtagacgactttggcctttccgcccttgaggccttcaacactaccagcggatttgatgatttgcacatctacgtcagctatgcccatggcaccgagggattggatgctatgtatggtgctgaaaagctgcctcggttattaaagctgaagaagaattgggatcccaagggtctgttcagctataataatggattgcctcactgaggtttattgcccttggtagatagggttgccgggacgtacctaggtatttgtacctggcatgtgaaccctgcaaaaacactatctaatgaaccaaatcaaagcgcttaaattatatagcatcactcgcaaagtgttcccgctgcaacgcagaaaacacttcccaaatctgtcgcgagcaattgccatttaatcgtcgcgcaatttcatgtatcaattccatgactcgaccttttagaaaccattcttcccgaagtggctgtagaaggatagcatagtgggccaacagcagcaaagcgcctgggctgttatgtttcaatagggccaggtactcgggtgaaacgcgcattggccatgaattaagaacatcccaaatagttggctatgagtcataacgcttaataaatgcaaaggcctgtgccaatttgaccgcggaatcgcggtatatatagtagtcagtcaattcggattcatattccggaatgacggagagtagtgtgattagtagtgggtcgttaggattagtagggacgtcgagatcatcccgccaaagtgccgtgaaaggtgccaatggactagtggtgagttccgtccagacggggcagagcatggagcagccattacggaggatctcaatccattccaatgaaggcgcatcttctccttggttattatctttgctcaaaaacaacggttggtcgttagactcggagcctagcgcgtaaacgacgaggaagaatgcaaaagccaggaccgcctgactgttattgctatccacattcatagttgcccatcggaatgcaggagccgcttgatctgcgtgttggattgactgaatcgtataatacgatcgatttttggggtcaatagaagcaaggtggagtgaggaacaggataggatgccatggagtaagaagggaaactggtgggctagctgtgggacaatgattcgaaacgcatcatctgtctcagggccgcatgagagggttttgtaggtgtagttccgataatggtctagtaggcctgcgtcgcttgcgatcaacatttggtaaggtctcgattctcgattctcgcttgaagccggggttgccgaagtctggaggaataatcagcaaggcaatgatggctatagccattgatctacttaccgtgtttgtcagtccacctgatttgtcagacgacaacgaaatcaacaacgccgggttagtaaagtagcggagagcatttccccggaaaaatgtctgcagcgggactgggtcccaaaaatctccaagctctgacgcagagatgcggtgtacagacacccagtgctgcttcatgcgcttggctgtgacacaaagatgggcgcagcccgcaaacgagcacgctagcccattttggacaggcagtaaaggcaccggaaactgggtttcatcgggcaagacggcatcactaggctggcttagtttaaatcccgaggcgtagtcgacaaacggtcggcgtgataaatgacgaagatgatggatttctttgagatggcgagcgactgcaccaggctgaatcgcgtagttgcaacgtaggcagatcagcacccgatacgtaggcagataatgtaatagttgggatggctccatcgcatggaatgagggtgaagccatgacactggggatgctgtctgtaatcaagtacgtagtcagacttcctccgacgtcggaatatgcagcaggtgggacctaagcatgttaaccaaggttctgaacgcgggatatcgggaggaaccttattgttagtcagcaaccgtggaatccatgggtcgatccctggatgggatgttgatcaggttcaatctttctcatttaaaactacgactacctaggaaaacacaacaaagattggggaatgtcacgaatgtcacaaacttaacaccggcctcagtcatggcaaaaacaggacaagaaccaagaagcaagacaccaaaaaggaacgagaaagaaaaaaaaaaaaaacatcctgagaatcaattaaatctccgacagcagcttgctaatgtccaccaccgggcccaactcggatagtgtctcctgccacatctgggtctgtattattctacccgaatcactgtctccatatccggcaaatggagccggcttgttgtcactcaggtacatgccattggaaggttcaccggccagcaccgatgagtgaaccagtgtacgagcaccaatagagacagagcgaccaatgactcttttcatgccaccaaggaccttaccaaaggcaccctcagccgtgcgatgcaactcagagccatagcaaaaaccggggttgaccaagttgagaatggtgcccgtggagagcttggctctggaccgtttgccaaacaactcgaggaagaagagttgatagagcagcttagaggtatagtaccgatcgatcatgtcgaagtgactcctgtcgtccaatacatcgagaagtgggattccttgctcggtagacacctgagcttcgggaaacttggcccatgcggctgtttcacttccgacgatggaaatcaccgggcgcgtgcggttgaggttcttggcatcttgacggtcgagttcaggcagcaatagcagagttaggagagcggtgcttagccaattgatttggatacttgactcgtgggaggtgggttggttgacggtgaagttggtgttggcaacaccggcgttgagaagagcaaagtcaatcaggatctcggagcgcttaaggcggtcgacaaacccgataatactggggtagctacccatgtccaactcccagacctcgaccacgggagatttggcggaggcggagagtgaagcgagaagggattcccgggcagcttcgcctttcgagatgctgcggacggccaaaatcaaatgggatagtccgagcccgagaagctgggctgaggcttgataacccagtccagtgttggagcccgtcacgatacccgcatttccgcgaagggaagtggtggacggggcctttgaagggcagatcaggaactgccgataaaggaagcccgggtaagtgttatagaaaggcattttgcggacttgatagggatgaaaatggagtataggacggaagagaataaaaaaaatgtgcgtgtcaatcgaggatataaatagttttgttgttttgatggcctttcatatacttcgttttagaactctagataggtgggaactcgacggtgccgttctacgttctgattggccaacccggacttagcacgatctccgccgaacggaaggtgccgttcccatcttgcattcacgctgagagcgaaagatagaggcatggcaagggtgtcaggcaggtcaggcagtaaggctcttggcgctacgaacgggcttaacggaatggtcgggtttaaggtaaatagcaagaaaaacgaggtctaccctcgcacctgtcttttggtgatctcaatataatggcttagattgcagacaaagataaacggtaggaacagccaatctcataagcaaaagatgaaggagactcagccagcgcaaatccagctttgggccaatttggatcagcatagatgttaatttatatagcactctaccgggtacctatttatggcatggggagactatgttgatgtctgacatgaatgactaaagcgattactctgtaaaggactcgtatatgcatgttcaccatgcgacgaaaacccagctgaaatactgtattctctcaagtcatgagattaactgatattttcaagacttattactcttatctggtatagtaacatggtataggtacagggcatagaaaaatggacttatgtacgtatatagagatcgccgtgttcggtctaagattcaggagcaccatccccgacctggcttccggtggtatagttaccaaagcatgccttttggaactgtgccttgtccttcagagtgggcacgccacgtaagaacttatcgagctgacagaaaccattgctggactcctcacaaccgataagtccatcctgtgggagaggagaattgttgagcataaaacgaatgtactccgtggtcttggcagtggacttgatgctagggttggtgtagagaacagggtccaagtaatcgaatgacacgtcgcgagggcaagtccagatctcagatatgaatcgtgcaccaaagggtgtcatctggctgagagtgaagttgcgctcaggcgcatggtcgatgtcaacgggcaaacccttggggccgtacttaaagtagtctagaccgagggcgttgatcacggacaagatgatatcatcgtgagacatgtccatgtaaaagggctggccaaatggaaactgggcttcgttgttggtgtaggtgtagttgatgcttgtatcgcttgaggtgatgagcttttgctcaagtcgagcggcgagctctagaacgtagccaatgccctgggcgcgaccgctcggcgagccataggcgtagtctccatagtactgtacatcgatgttgtattcgtagtccttccattcttgctcggtgaaaagtgagcagaatgatgagccgccaagactggtgtactcgtagacacagaggttctgcatagcaagaacgtccatggcggttaagttgaagtcgggagggaagtaggaggacagacgggtgcgagcatcctttgtgtatcgaggaatgaagatcttagcagcgttgtcgctgtggcttttgttaacacggtttcatggctacacatacattgtcggaggatttttcgctcacccttcagtataatcaaacgtacacgtttcgtaagaagcgagagtgttgttgaaatcagcttgctcagggatcacgacaagatcatactggtcgtaagagctgttggctccactgttaccaaagaaaccgcctagtcgaagaggttagttggttatccaggactgaccaattagatgagagttccactcactgagccaccaacgtgcgctttccaaaatacgttcctgggaggtagtgcgaaacaccggtgtcgggcggtctgtgccgttggggtaaacgttaagagatggactccaagcagctacattctcacgtccaacacggtacaaaagtcttccgtacttgacccagaagttggcaccggatgcagcctcagtcgcagcaccattctccataagagtgtcctcgccaagaacatagtcccagttgttcaggaactttaaaggacccacagccacggtcttgcctgggttagctttgctgtaattggtcaacttggctgcaaagttggtcatgccctcgccgtccaacgggtaatctgtggggaatcgctgcgcatggcgatgcagaacatgcacttgagacagttcacatccttgcggcacaccactcggaacgccgaagctatctgcgtccttataggggctgagattggcccagctcttggccatgtcaaaaccagatgcatagctcgaacctgttgggctaggtgcaggagcagatgcactagtcgctgtagctgtaacagcaactgtcaccaacgtggctccgatgaagttcttcatggttgatcggaacctcctttttgtggggtagtgcatccacgggtcacttcaacctcccgaactcggcgtttggagatacccagttgcaactgatccttaccgtgtaggtaagtacagtagatgtccacgggtgatgcgactggactgtttgtttatcgaatttcaattctccaattaactttcgggggattgttgttccacgtggtttgtttccaaggttccgtgattggccagtgcggtcatcagtctcccgagatccaacccgccatatcagattttgcctgcatactgcatactgtgcaatattgcatcgggatacaccgatgtcacgtcgattctcgacagtcgaatacttaaagatcaaattcccaaaatagatttattgcgcttaaattcttcccacaggccgccattggcgggggcgtgcccttgcacgactgcgatgaaaccatccgcgtaggctctcacagcgtcagtgatagacttgcaggccggagatgacttggggtagaccccagtgtggatattggccacgaagtcgcggaagaatggcagggagatggtggtgaccgtgaaggcaccctgtctgtcccactggtacagggtatcgtaaagctgctcagcagtcgcaagggtggccaggtacctgtataaagttagctaatcagacttccaaatgaaggcatatccggacccgtaatacgtaccaagagttgccgcccatgaaaatgtcttcggtgtacctgcccacagcggctgccttgccggcggttttgcccttgttgatgccgtaaatggaacgggatccgtcggcgagtttcttgtggtttggcaaaggcaagggcaggccaggactggaaggtgagatcgccgcatacagcggcggggtcgaaggtgttgatggaggcgagaacggagttgatgtcaataccgctgcgacaattggtgggcgagttcaagatcagcgccgtgtcattccagaagtcctggagatgacacaagatctgtggtgcaagcgacgcaggatttgcctatgtcttaaaggtgctagcagacctccaacgcgaagatcccaagtttgcctctccggcagctcgacttcttagactctttcggcgcctgtaggagtcgtgcgtgtccaagcactttgatagagaaaagttagagcgaaataatcaaaagttaaaggaggctagcataaactaaacaacgagagagacggcctacagcttctccacgacaagcagctgcctcgactgctctattttgagcaggtattggaagcaccttgggactgattagcctgctcgatgactggaaccaccctttcaggccaaatctgacagagctgccggacgttacaagagaagggtgaggaattgcctattccagattgcccggtcgtatcttggcgacagagaaatactagaagtggcgacgcagtgcagggagagttcccgcgtggaaagcagcttatatctccccaagagtttatagcaagaagggcataaaatagccaccgattcattatcaacacctccaccgcaatgtgtcagcgaggaatcccgcatgttctgggtcattctcacccgtaatcaacttaaaggtctcagggtctataactagtggatctggtaggacctgtaatctaatatcgaccaatcgaatccaaatcccctcgtaaacggctaacccacttaatccaagctatacctttctattttctagcactcctgatttgatccagccttgccatctacctgcattttgtatgggtggctctgatcgtatggaggagggttctctatggcgcttgagcatattgacggctggtgggttgactgggaatgtgcctgtggtaaaggatcgtacggcggagggtcatccatggtccttgtacttgtacagcgtattgacggctggtgggacgactgggattgtgcttttggcttaggcttgttcacattgctgtcatggtttgagcgaggctcgtgtggagggtacgatggttggacatgagggttgttcatttggctaccatccttatagcccattcgccgcttgttattaagaaagtactgttgctgggcagcatgtcggagcctttgggaagcaggttggagattttccctctgcttctgcttctgctcctcgtgttcagcggcggccctaatgtaggatatatgagtatgagagtgacaagcatgggtagaagacttgaagaacgcacttggatgcggctttcataaggctatagccaccatctaaagcaaggccagtcttgataaaacccatgttttagaaggagagggagtttcggtagaagcttagtagattattgaaaatatgacaatttgaagtccgggaaaccgaggcgtatttattactgtctagcaccggaggccgtgtcgttcgaaaatcagagttgggcgccatacgggactttgtaattaacgaatttccaatgcctccgccacgatatggatcttcgccaagaccacacaacaacccgggggccaaatctagcgcccaaaaatataatcgcctcgcaagctcgcctatatcgagggacgactcccgaactcgagcttttgtttgagaccggcgcgcctgctgtcgccgttggactacatattagagatatgccgccccggctgaatcgtcgaaaatgtattggttgatttgatgcaaggcacggtttgtccgaaataaatcgggcctctgtccttgctcgtgggccagccgcctccttgggaaagatccgatacctacagaaagcggagtgtgatttgtcgagctatgtccacggcggggccccgggggtctttcatatattgtagtaagcttagccccctgattgccaagactgtggggcctgtaacttgcgagggtccgtattttttgaaaaaaaaaaagaaaagaaaagaaaaacaacaggggccggttaatagaattcataaacctctactccccacgtgggcggtatatttgacactcactttcgagaggaaactcagggagccctggagagtcagcctgattagacagccttgtcgttcgtcgctttgacccatctcgtatttctcggcctaaccgtcttcggaagcgttcccccgctactatattgacactgctatatacacgtgtagttgatatagagcaacccttcataactcttatatgcgagttctcctaatatactgtgatcatacttctctattataattatttaagtcaatatacataagagctatatccatacctaatggatccccaaagcttttttcaatgtccgtgtcgactatcaccactaagttctggacggccaccgtcctctagctcagacacttggttcacttttcttgagattccagaaacctcattagggcctagagaattattgcctaaagacgtccctgcggctaccgaactaagtggtgcgacgttagacatactttgtctaagttcagacttccattttcgctcaagcatggcccaaatcaaaaagagtagcgctaaagcgccgagcggaacgccgacaccggcacctatagcagtgtcatggcacgtctcggagccgcctaaaccgctgcttatgtcggtaggggacgatgattgggtctcggacggtgcttgcgtctcggtaggtgctgtggtcgagacgtttgagagaagagcacgtccgtagacggcgttggcatcttcgagctcaaaggtttccacgccattatcagagtcatcgaaacagccaatatcatcgctgccatcttcagagtgaaccagtcttggtgcaccgcagcagtattgagagcttgagccccaggtgtaaatgatactaaggatggcgcccccttctggcgacgagtattctaattacgttattagtcggggttcgtcactggtggttgcttcgaaggggatatcggggagatttagcttactgcaatgcggtgtgcacccggtccaatctttgtttgtgcatgctcctcgccataaactgtatggttgttcccctacacgcatacagaggccattgtctagacagacatcttcggggccacagcacgaggtgttttcttcggagccgcatggtacagtatctggggcttctgtccctaagggaaagtagcaggtgcggtcgtctgccaccatggttgcgactaggtgtagaaggggccaaacaactgtgtacagagtacggagtactgagtggaggcgatctcaggcaaaaccagctcaggagttcaggtcgcatataagcccgagttgcagggaccaagcgagaaactccattatgatatttggggctgtgtagcgttgatcgtatctgtacggagtatatgtacttgctgatcacaattcttgaccttgagttccgcgatcgttgcttcgttaaaactagcaagagcgcccgtcaattacctttgtggaaatgatcgatattttgctgttcgaaggcgggtcttgccgagaggttaggtcgaatattcattctaatcaggttaaagatcagctagccttggttagccttgcactataaaaccggggcatattattgggcgtacctgcggagtattcttatataggtaccgacgaactacgtataatatatagaattagtgattggagaagtttttaagatcacgacagcggattgtaactgcctcatgtgtgggcaggcttgccctcgagatgtttcaagtagggcatgttccgggaaagccttagctccagcgcacatgcataggtgttactaagtcctttcccacctgggcacacctgggcaaccccacaccaacaaccacccactgtttcttttccttcctacactatgtatccatatgcctccctcaggtatggaaaagtagctcattgcatagagcgaaagggtgagctttcagctttagctattatatatgcctataaggccggtgttacgtagtcaaagcgagccattgtgccagaaaacagactgagtacatggattaccgattccagtaccatcgaatacatgtgattttcgacttcgagaagaactggatccagcaggacaggattccaaggtatgctgtctaccaggatcaagatctgccctggttagtgcagccgcacctaccactggtgaatgcagcagctgtgaagaaatcagcaagagagcctgtatctgaggcctctattaaaatctggcatcgccggctaggccatgttagtaaagagagagaaaagctcgaagagaaaggaaaccggccaacaggcctaacatgggatcaggatcagtctgaactaatcgcccagatgcagatgccgtcatccataacccgtatcgcgctgcatgataacgtgcagcatgcacaacaaggccaggatctgcatacagatagtctgcaagatgaagagatacaggatccaggtctgacagatagaaagacgcaagagagagagatgcaaagtgagagaattggaagacagcagaccccaattgctgtgcaaaaaacatctgattatgaaccgattaccccggcgtcggtcgaaccgacacaacagcaccagcaaacagcaaacagaggggtcttttccagcgaatctccctttacctccgtcacctacctccctagcatcaatgcaggtagtatgcgatgagctcactctcgattaactaatgactctgtagggtatctctgaaaatagcataattcccttcacccctagaatccagaaccgcaaagataatctcctcaaatacgcccatgaattctccttcctccaaaacttggcggaaaagcgaagcaacctgtaatggagggttctgaaatgcgccacagcccattgcgccaagtacgcaatgtgtgacattgttcactgcgaggacacgtaaagtctgtcttattttgtccctgactgtccgaatgtcttgtggacgcgctgtctattgtcagcgtctagtcgtacattgtggtgttcgtttggtctataccaaaattgcgcttatctggtgtcaagagaggtcgccaaattgctgctaagctgacgacacccacggtgaacctttctgcgggctcgtaaattcgggcgcccgtggctacttcatctctgaagacgaccacattccgggaccagactgcaccaagcacaggaagaggatagaatcgcttatgtagtgtcgaagccagtgtgcttcggaagcatagcgcctcctcttgtgctaatgctccccgaagccatcctcctccagggtgcttctcgctagccatattcaagaccccaatcttggcagtgggattggtgtcgaggatagctctggcggccgtaaagctatcgctattctggacggtgattcttggccttctcgcgtctggggtgggaccacggcgtggtagctgcgttgagtagtaaatggcctctgttgatgcatctgcagatctgatgatttgcggggtgagcctacgggtttcctgcgctaaggcttggcgttgcgccttgtttggaggcgtgggtgcagttgaaattgtcattatgtaaaatcgggaaaatgacgaggcaaattccttggtgtcagttggggggaactgggccattttatatttcttgcatgacacacagtgacgagcatgatgggtaagaaatacgaacgggtgggccgaggcagacagcgatccgctccgccttagcgtatgggtttgatgattgaaagggctaacagcaagcgaggtctcaaactgattatctgatctggcagagcccagagagagagagagagagaaggttcgatctctgactgggtgagactggctcatatactaactaactagttagctagttaagttagttaacgtatttcacaagcgagccggccacacaagcgagccggccaccccacccaacatactaatttcaaatgcatttatctcaaccaaaacgccattaaattaaataaactaaaatcatcatctatctgggcatgtttctcttctatgccctggcttcctacatattccacatgctcgtccggcctaggggggcggtcttaaaccttccgaaacctgctcacgatagttgttgatacgcgctacttaggcctcaaatggctccgaacgtagctcacgaatatcctgaactaagagatccccttcgtggactatagtccttatagatcgagttcgcttttactttttcttctcgtttttagcgcgtaaatcgctcacttctttctcgagtaatacggcggattgtattgtgatctggtaggctttcaaaacctggtttatagcggaattaagcgggctcggggggcttcttgatcttatacgaagcaatgctttaattgacaaagcttgcttttataactagatatagttcgagggcgtttttagatcctaatcactaccccggctagagggggggggcaggggttcgaagccgaatattaagctttaaaatcactatctccggtgtaaaaggtattaaacctatagatcgaaagctatttttaatagtctctgatttaaaagctttaattcgtgcgagaggatatacttcgaggaaatcaagtttgtcgatataattgattccgttccgcattttcattttaactatccggccgtacgagcgttttaacaccgtaaaacagccgatatcgagaggctataaaagataagaggaatacggaggtatatagattagtatgattttattcttttcacagattttatcgaatctcggggttaaatgacttctatagccgtcgagtattaaaagccgatacgcccccttcgtacgcgaagaagtagtaggaataaagagctttttaagctagcgaagtccaatttcattagaggtctatctattaggactaaccttaaatctctagtcctccgggaggctatcgaactaggatttaataaagactttgcctttaaaaatcacacacggcgggagggcctagctagtagcattcgtacacttaataatagtcacctattctcgatttctaggctataaaagtgctcgccgactatagtattcactcctcgttataaccttcgcggttgccgttaaccctatcgcaaaactagtcttattaaagttataaatattattagggtcgatcctaaattaaaggatagttttttaaataagattaaaccactccctaataaccttcgggtcttcgtatttcgcacgctcgtagttataccgtttcgaaaaccgagaggatagaagaggacgtcgtttcatatagttcgttacctagttttcgctaatagaaataaccggggtagttccacgctttttaagaagaaggttcgctatttctcgtactatagaaggccggggggctactccacgtcgatctatagagagaatccattttttaagagattcctcttcaatttctattagtttatgcgaattggcgcgagaaatcgcgcggctttggtggccgtgtagtcggtcttaaagtgttgaacgtagtatcttataatagcgcgctagttcacgaacagaagaaattttttgatttttaaaagcctggatagctaataagatcctaccctccttctctattgaatttctagaggattgagagcgaattggtggcatggcgggtggttgaattaactaagtgctaatatatagacgcgttttgggtggggtggccggctcgcttgtgtggccggctcgcttgtgaaatacgttagcaaacgtgtgaagcctgacaaaccaggcatctgcctgtctaccataacactatctcactctcatctcctagtggcgatgatgaagttttcttcgccttgttgcttcaatattctcaaactgcaaccaccaagacggctgacgtatggaacaatgctaagcttttccggggcggacctatggtttaggattggcggcgcggaggggtggctgcattgaggctcttctactagtctgacacttttccggataaggagactggagactcattgtggggccgtctatgagtcgtatgaggcttgcgggccttgccgttatcaactatagaaactgagatattgtaagttaatatactgtagaaagtgtagaaagtaaagtgaatatgactgaacaaagaaattcaagtgaaggaagtctatactatagatgatttgtatagtctatatcgaacaaaataaccacggtcaatattctttccttaaaataggtctacaaaactattgtgatttcccacagttagttatctgatccctgtaatagaagactactacagtcttactttcctttctcctctccacaatacaacatattgcgtgtctcgtaatctcatccacattgtggatcttgacaggaacaactaaggcgtcagagacactatggttgaacatctctaccactatcagaacttccagtgttcttgctgtcccatatctaagcagatacatacgaccatagggtgtggaaaatagggcttcccgtccgctcagccgtactcaagccacacgccggtgagttagtagttgggtgggtgaccaccagcgaatcctcactgttgtatgttttttgttttcgctttttttgtcttatgcctgtctgtcttgcctgcatggtgaggaaaacctcactgccaccctggttagaagaggtttatttttgtgagactatgagattacggaggacacttagcccatttatatgacctgctcggtaggtaaagcggggcgtcaggtttctatgggtcggactgacatgatcacatagtttactggcctaatttcaacggtgcctacctagctaggtacttaagataggttcccacgcgagacccgcacaacgtgaaaacatgcaaccccgtcgttcgccaattgtgcgacaagcccatactcccagtcaagatacccctgcatatgcttgcgagcgttgtttgtgccttcgtatggtctcttatacacgtcgattggctgcgacaaccatcgtgactccgtctcgaggggatggccggcagctacccaggccattgtccctcccaccaaatacagcacttctcgcgagatcgactttcgtgcctcgtcaacattcatcgcggcaacatcaccatccggcgaggtcagcacgatggggccaccaccgtcgagaaccctcaaatctcgtgcaagttcgggaccagaagcaaaccatgcgcctgggatgtggcctttttgataggatgaactacgggcgagatcgaccacagtcgctcctgcgagatttcgaaggtcattgatcgtgatagaacaatccgttgaaggatgccacgaaggtactttaggcaacggaagtgcatcaggcactccagctcgctcttcaaagacatacacctcccaaccgagttgtaagagccagctggctgtcatgcgcgctcgcacaccatctgtgtcgtataaaacaatgcgagctcctcgaacaccgacccattcatcggtggcttgtactaattgacctccaggagcattggagaagccaatcggatgtccgagagcgtactcctcggggtctctcacgtctaacaggtacagagtccgatcttctaactccgcggcaaatcgagtaagctgatcgctgtcaataaacgagacgccgacgtgattcgcccaggattcagcgtatttccgtgccttctgcaatgtctcgactgaagggctcggaacccgtctcgtctttttggtctccagttccaaaccctccaatgtccacccgatcgtcccatttcggagcgcaaccactttattcgggattccagagttgatcaaagattgggtgccaacaatactccgcgttcgacctgcacagttgacgatgactgtggtttctggagatggtatagcctcaaaaaagcgatacaaaagttcccctcctggacagctgcggccgtggggaatgctcattgtattatactcttcgaaacgtctggcatccaagacaaccacatcatcctcgctctccagaacatccttgacctcccgcgcagataaagatggggtgtggttgatagattcaacgagctcgccaaaagccttggacggtacattgacatcgcgatagacctcgccaacgagggcgtacgcagaaagcccgcctgtcaaaatggcaacatcccgataccccagggctaatatccgggcagtagcccgatctacataaccctcaccatcgtcgtagacaataattggagccgacaaccgagggactagggaaggcaacttcttctcgatttctgaaactggcacacttagtgcgaataaaggatgggcctcggaatagggaccttcttcgcggacgtcgaggagggcaatttcatggtgatttacccaatgctggcgcaactcgcgtgcggttatagatttggtcatcttgttcagatgctaggatgacaatttctgtttatttgaaatggagatggagttgatggaactctcagagaagcggagtctcgggtgtttttctcggagggttttggggaaacccgccacgactgcttcgaaaattgatattcagaaacacacgcaatacttgggctttgattcttttctacgattgacgcatcctatcccaatccctgaagggaaagaggcatagaatgccgttgcttaggaggctgcccttctgtaccccgctctgagctcggttgacgccatctcagcgcaggatgaccaatcgattccacctgcccaggtggacatcaactccgacctcggtcatgtccgtttacatcaagctaacacactgaagtcagtatgtaccctcgacagcgaagttcctgcgaaacatgccgtaagccgagccgttttcagtcccgccgaatgtgtagctaatgataaataggggcacggaagctcaggtgctcaggcgaaaagagcggttgctctcgttgccgaggctcaagagtgccttgtaaattcaaagacaaaggagcccctggaaggccgagaaagcgtgcacgacaagaagaaccagatctcgatttgccgaacggagataaacaagtaggatcctcaagctcctcacatttatcggctgtcgtttctcactcggcctttgctcagcatgaatctggcaatataataatgggagatggtgagttcgactcattgccctacgagctggccgggaactgtggattcgattcctgccactgggagacgctcgggaacggcgacatttatcccttcccaattgagttattgcagacagaacggcgtgacggattgcaagaccccgagatacctccaatagccttggatgcatacatctcccccatgtcattctcacagtcttgtaaatgcgacgaagaggtctccgatctagtccggaaattgagccacgcgagcatctcacacagtatcgtccccattcttcgcacaggcttgtccctcacggagaggctactgatatgtcctatgtgctacgacgtatccaaaccgcctcgagtgaccgttcaaaaggtgctccttattggccagctgatgttcgaaataacatccggctatcaaacgtacctccgctggctgaatgaacactgtactgagctcgatatcagcaacgagagtagaaccgtctatctcggagtcccgtctgaactgaatttacaaattagaggtgaaaagcttcgggatcttgtcgtgcacggcctccaggtggatgtcgcaaagcttttggtgttgggtaaacagtttgcgcagcggcaacgtgatcgccatatggtgggccatgaagcttgtctcgattctgaaggccgttgtcggagaaaggaggaggcagttgatcatgatccactcgatctctgcccgcaagatccggtagcgcggaagttggtaccttgtttccgtatcgttgatgaggtcagtaggatgatcaagcaagttgcagatgccgttgtgtgatacccatgtttgtaatctattcatttcaggtgttgctggacaccatgaaagcctcgcacattgggtccctactttggtggacatgagcaatatcttatgcctttcgaatatcatgagtgagaaaccggagaaacattttccattcaatcaagtggctatctagctcttacacatcgactgcgcaatgtggcacctattcattcctgactttccacaagaggaaggcaatttcccaagccgacaaaagcatgaggatgtgatttcaacatctgcctccacaagggcaagggaaagttgtttcttgataatgtttgcctctgcatgacgacccaacagttgaaggcactcgtgatacccatgcaaagcccacacgttatttgggtgctgatgcgcacgtttcggtgtaggggagagccccaaatcttcagcataagcctgtgccgcctgctcaactcttccctgttccaatgagagcgcagcataagcatgccgagctggaagcatccacccccatggctctgcgaaagggagctcgtcttctagagtaattgcttcccgtaatctggagaatgcctcgtcataatcgccttttctataaccgatttcgccatccagcatcgcagatgctactttgagaatgtcggtgattttgttagggaaatcgagacgtgtgggagggacaagcttagaggcgagcttgaaagattctcgttctttgtccgcttcctcgagctgaaacgtggccgcatacgcgatagcctttccatagtgtctcatcacgttcgtgacacaatagagatttttatcctcgagcgggtcgagcttcttgagttcctcccacattccaaaacgaatgagcacatggactctaacggccttgaaaaattccatccagtttgcaagtgcaggcgtttcgacccgaagaatttcctccgtgatagtcgcctccattcgatccgtggctgacaatgctgccttggatttcccactaagcatcgcagcatagatgagggagtgatagtcatgtaaacgatagtagctgtagaatgtcaagccgccattctgttcaaagtatttgtcgtctgcgacggtcgctttcagattatattccacagcgcggcggtaatcgcccacgaggacatctatatgggcaggcatgtggaatgtgtggcctgtatcggggaacatttcacggatcatctctgctgccggcagggcagcctcgggagtcgccgacatttccatcaggtggatgtacatgtgtgcgggacctggatgcagttcgactttcggcatcttcaacgcccgatcaagtaggtctttcgcttcaaataccggcgaagacgctatcgggagccctgtggaggcgtcgtatagttttcgcggagcacaattcatcaatgcgtcggcaaagagtgtgataatgtcgaaatctccgggtccgaacctcacgtacacctctctcatggcatcggcatacgctcggctacatccagcaagatccatatttgggtcatcgttggggtaccgttttgcaagagccttgatgagcgcttgctcccattgtgatgcactgtttgcccgtctcagcgcctcttgggaaaatacataacactgcttgattgcattgactcgatcgctttcgtcgaacagcgcccatgttttgttgtaattagagcctgagcagaaggatatcccccagtaggccatggcgcagttctcgtcgtgggcgattgcctgcttgtaacaggcgattgcttcgtcatggttaaagcaatatgtccatacaagagctctgttgaaccatatctgggcttcctgggagttggtactgactttgcgactgaatattcccagatcaaagtaggggtcgctcgaggctcttgcgggcggttgggtgccgagggagcccattttctaagcttgataagccgaatacaaactgtgctagtaactgtcccgcaaataggaaataacgttggatccaaattagcatattaagaacttcttaccagggggatataaggagtcggagggtttttagtggcggtcaggtcggttgattttgattcgactctcggacctttttagaatttcatgtatccgttctctcggggtgctaggcgggcgaagaaagagcttgtcaaagccagcaataagtggttggctccggaggtagagatgattgttctcccacttgccgattataaccacttgtgtgcgtttggcgctatcacaacgatattgttgtcaaatccccacgactccagcacgatctccggcgtgctccgaccgatcatgatcgcgatgaccatttgaacttccccgttagattctgtaagccagaatcccgcatccgacgttaacttagaaggcgattctgacaagtcagattctaccacaagtgagggccatttatccgttcgagctttatgaaagtctcctttggcgagtattggcagtcgggctgtttagcgatgccgctttctgcaacgcaagtggtggattcaaaggttcgaagagagctgtcgaggcccatcggctgaagagactgtaacaagggtctttggaattgccgtgtggcggcttcatgtggctgggaatctagcaccttgacgaggatgaggttttcaagagagccataagaattacagcgtccctggatgatttacgagccaaggaaatcgatttgtgtctaaaatgatggccagggttgcacaaaggctccttcccatgctagtagacgaatgcggtctaccaacctcatgtgcctttcctaggacagacacccgtgcgttaagatgtgagctcaaaaacgagatgatgaggtcattgtggtcaacaacgtctcccggggcactccccgggggtaagggctcagccacccgccacatcccaacaaattgcccgatttggatggatacatacaaatgtacatacgagaatatgagaaatacggggtataaagccgagcatatcccccatctgccggatgtaatgtaatgcaatgcacacccttgtctccataatcacaccatactggtacaacttgctgtgattatatccattttttatattttcttccaataactcgcatagaccatggcaacgtcaggtctagctccagtcccagttcctgcaggatccgatattccgacgtatagccaggtccccgagacaacttttgatcgtaggtcttatgcatcttccactcatgcactactgcaaagatccaggatcatggcgaggccgagatttgagacaccgttgctaacatgtggttcgcatgcagtggactgggcggacctcgcaaccttggatctatctctgtttgacgagcccggtggtaaaaagcagttagccaaacagctttttgaggctatccaaaatataggttagtacttcacaatttcaactcctattttgcacgcttggaatacttataaagccttaggcttcttctatattataaattttggcctctcgcaagaggatgtcgaccgccaattctctattggcaaggagctattcaagctcccaatcgaggagaagctcaagtttcgtgcagagactgagaacggtggttacaatggctacaagccaatgggtctccgggtaagttgcatattgataatatgtgacccgaaaatcagtcatctctaatccttcaacttaggaaaccagtccgggggttatgacaagacggaaatctacaacatcccgaaattcatcccagcccttgagcttccgcagctggacattgtgaaccacaatcgtcccatcatcgagggcttcgcacgccatattcatgaccagatagcacgcaaacttctcacgctcttcgccatcatcctcgagctacccgatgactacttcctgaaggttcatcgctacgacgagagaagcgactgtcacctacggtacatgaagtaccaccggcgtacagaggaagaaaacgagaaggccggcgggatttggaccaagggccataccgactttggcagcatgaccttgctgttccgccagcccgttgctgcgctgcaggttcgcacacccgagggcgagtggaagtgggtcaagccgtatcccgagagcatcacggtgaaccttgcggactcactccatttccttaccaatggattcctgaagagcagcatccatcgcgtcgttgcaccgccgccggatcagagggacgtagaccgcctaggtgttttatactttgttcgaccggaggatagtctcgagctgcggccggtggtgagtgagacgttgcgtcgtctggggtatgatcagacaactgataatagtgcgcttggaatcactgctggcgagtgggtgaaggcgagagtgattgagggagttgacagaggtgcggttcaaagtgaaatcaaagatcagcctatcatcgggggtgtggtagctaagtattatgattagagtgtacacatgtggtgtctcggatgtttgtttatcttgtacccacgtactcagtttactcacttctctccttcaaacccctcaactcactttacaaaatatcattcaaatcgcagtaaatcctccgggcttccttctatggtcacaccatctctatcctcccgtgcccctagttggtggcatagtcccgagatttggcactttctgaggaccaactcgagcgaactggtccatccagtttcgaagtcgattggaaattttctgtgtccgcattaatcgtacgccaaaaatattgacaacagaaaatgctatgttgctgaccgtcaagtgggtgcttttgcccttgtgatacagtctcaggtcaaaatctcagcactctgcctgcactcgacgtaggcccccaatcggatccctgtcaccctgactcttctaggagtggcttcaccagtcaacgatacatctactctaaacagagttagagaaagtgtttctacaaccaatcatacggcaacggtctacagagatggtggcgtggagaatgcacgatgaaaagaatggtcaaaattttgactttcattggtaagtcagagctgatcgttctcccaagcattctgctctaaccaatttttataggcgcctgcttatctcacaggacaaccatgagatgtttccgacctatcgtcatacatgacgatagatatgtcaagtgcctgtggcaaaaatgctgattcaatatcattctcttcgaagtctgccacttgcgtggcagaaaacggtcccgcaaagaaagtcgaagccctcaagctctccctacaactgtcctttgatctaacggatagcctcctgctcgtcgaaaagtgggactagtgcattcagaaacgcagtcccgatttaatagcatgataaccttcgctctaaccgctacgggactgcaatttgcaccccaaaactacaacggcaaccagattattcttactcaaggtaaccccgcgagaccgggtaaaaatggccatcggttgtggtggagtccgggttttcagaatctccttcaaagttgatgtcagatgtccgctattggcttacccgattttgctcgacaagacggggtgaaatgtcagcaagaggttaagttcacagaggagagaacaagaaggtctatgtccagggccatcccttcgtcttcggcttccccaagctctccgcattggtgccgcatggtggttcggaaactaacaacaccggattggttttactgttcaagatccacaagaacccttttggggtggatgctcttgtgtaagtcccctgagtctatggggcttaggtatagtcaaatccaagattcgggaatgccagtctctccgctccggctaatttccttacttcgttatggtagcacaggggacattgggacaaaatccgtcatcgggcattgttgggtattcttagtcgaccgcttaggtagacagaaaatatcaccctttttcgcttctctcataacattcatagtgttcccggtccatgagacgctcaattcagcatccacaatatctaataggctcctggactatatagtaacattgtggctacagagaatgactgctgttgaaaccctcggtgtctaattatatctcaaagtttggcccgcatatcttccttgtcgatgatatcacaggatgcatctccctcaatagtctcgcagccagcaacgaacgtctcccacctctccgctgaaagtatcggggctgtgatatacggctccaccgtacccagtccattcaaaagctcacccacccgcggtacaagagcatcggctgccttgctctccatttcgaattgatctgcccgactgagtcccagattctcgacataccaactagagtcggtcttgatcacaccagcttcgaacagagcaagcagatcgggatcaactcccatatgcaccgctgcctcatatgccatgcgatggcctattgccagaatcagggaccgacagtgcgggagcatgcgactgttgtatgcctcgcttctgtgtccttcttcgatagtccccaggagcttcttcagtcccgcaatgtagccttcctcgtgctttgcaattaacgaattcggcttgatggcattcgggatttcgtaccgaccgatgaggatttcagtggccagtcctatactgtgttagctgtgtaatatgtgtattctggggtgtggggacattacgaatgcaaaggaccgaaatttcaccttccgcgatgccattgcaacgattcagagcctacacagggcggtcagtacttcttgtatgttcttttgggttgttcttggatcggcttacctccatctccaccagctgattgtggataaacacaccctgagcaccacatcgctcaacgagatttgcaaagcttttctgggtgtattgcagaacagctcccttgaagataactgctagcccatgtctaacagaaaagtcaagtgaagtatcactaaatttagttgtgatccagtttgcaaacggttccacaactgcactctccgccaaggcatgcaaaatgggcagttgctgagtacggaaggagatgatgggcttcggagatccttcggggccatgaaccattcgacggaggttgtactttcccgctatgagaaccgcacatttcaggcccggtattgctgaaaggctcaaagagagtgttccgaaacctagacggttgatggccatcaagaattgagttcgcatgtcgtcaggctttcggtgactgcctagcatggcagttgatgggaggcggactttgttgaatgaagtgatggagtggtcgagagttcgtccgcaagcgatgggagggagtagcctaaacggcatcattagtcggagttcaactatttgctttttggattttctatctcactcacgttgtcgttacccctgtgcacatctcctttccatccccgagtccaactatgaagggacgaatccctctatcgtcgccttcaatcatgagacgtgcgaaaacgagcgcaatgcgaggcataccagctatgggcattgatggtggcataaatctagaagagttagtatagtattcctttctgctctcttggggtttcagcttactttgctgctccaggcgtaagactgtgaaggacaaaactgccatcggactgcaaggtcgcagtggtttccagattctttgcatcacagccatggtcaacctcgttgagcataaagcaagcactgtaggatgtttagtgagagggcttcttaaaatggttgttggatgcatcgtacgagacatcaaagttcaggattttctccatcacaggtcgtaggtccggcctcttcagggtataaggggcgatcgtgccagcaaccaaattatattggatcgaaaacagaatatgagccacgatatcccggattattattgcatccatatgggatttccagaactttggggtgagggagaggatatcgtcaatcgtgagccctatgatgttgttagtcccgatttggtagtttggtatttttcaactaaccatggtgtctgcctatttctctggctcggtaataagaacgttccagggtttcatagcttgcagcctcatatccctttgactgaaagagaggagtagataacagcggaaggctggattctgtcgggacttgcatggtaaaagaagatggacgaaattaatctgaaatctagatagttagatagatgtgcgatcgaacattttatagctatagtctatagttcaaatgcaattgactttttcggccacaccgcattgtctcaggcacgaaccttctaatatgtcacaatctactatctcgtgtagcccatgatacatcggtgaacttgcatatcctggatctgcgttctgtccacaggtactgcatagtggattagcaacctagcaacttaggttgttacatttgttcccagccagccactacacttccttctctgcaatatagtggcggcgggtcatctgggaactccttttttacgaggtttacaatgcgttgtttcttctgaaaactctatcggcatatcggcgatcacattgtgcagggtccactgtttggcgatttaatacaaagtgaactactccgtagatgaactagcttcgatactacccatgggaaccctgctccacccgcggagatctccgcatggacatgatacatttttagtggctggtgtgggtacttatgcaggtattcccaattgggataacgcatctcaatttagcgcttcctgcaagccttagctccgcatatccgctcaggtaccttattagtagctgctatattctactgctgctggaacaatattgcttctaaggccagttctgctggcatttctgtattataacgtcttactaaagacagtcacgccgaaaactctatagttaaaccgatattgtatagtcttgacaaatctactgacctcgcttttatcacggagtactccgcagttgtatctcagtgctacgcatgattcacgtagctgatctacgatcattatttgactggtccaaggtccctggctgccccattcagacaaactcacatgcgtcaatttcttttcagctcccccacattggtgggtccaacgtagatggtgcagtttatgtgtcatgccaattctcttagttaggcagaaactgtctaatagtttgtagtcgaggtgatagatttctgttcatatctgatttggttcttccggggttaaccaaatccacattgactacttgtcgaacccacagctgtaccgtatctgcaccgttgtaaattcaatcaggtgcatcgcgcggtcacatctaggacaatgtctagtcggcaagaacgggaacctcactcagagaggcgcagttgattaacttgaaacatctagctggatatgcaagtgttattctgctccgtttgccacatcgttcagctcaccttcactcatcatccatcgtacattgtcacctacggagtactccgtgtgcatctaaagatgcatgaatcacgtctagtatgttaatgcgtcttgcatgaaggatattcagcgcttcgtttagaggtggctagaacgtgcttgagtatccgaatcctccgagggattcatctataaaagggctgctatttcccgtaaaattcaactcattactccagtcaatcatcatctcttccctcaaaggatcataaagcaacaataaggtccaaattcgttgacatactcggaactgcaaggtgaatagcatcctgtcccagaaacgatacaaatacttaccatggtttaccatgtttacctcagttggactggaaaccaagacaatggccgtgaaattttcgtcttccctacgtaacggacaatatgcggacgaattctacaaccgatgcgtcacgaccatactcctggcactgtcaatctgcttagcgatgtcgtgagatacagtcctcagttctgggcgttccccgccgctacaccggaatctcgcccttagtacttcattggttcaaatgcaaaggacctcatggcaactaccatggctgcccgaatccgcggatatgacaacaaccatggcactggcgccatgccggtcattcccaatgacgcaacatccaacgtggaatatgtctcaggtggtgcgtattacattcacaccaaggcaacaccccacttgtactggtccattagaaacggaaacaatggattcatcactctcgataccagaaggcaaccaaattccgaatcaatcgcgatgactcgggaaagccttcaccagcaccggaaaatgatcgccctgtccttgaaagacggtatccaactacttgcactgagctctagtggatcccacaacatcggtgtgatgggtcaatctgtgtcggtcaatgcaacttccttccggttcagtttaggtagctttacaatggagacttcggggatgcctgggatgagaaactcaaatacaccgcagtgccaaccctcgcttacaaactcgagtacgctggtgaggagtgggagcttgtgcactagggttgcgacgaaggaatcgctacgttcaatacctttgattcaacgtcttggagtctgtgagtaaattgtatccaagcagagattgacatacagggttgtttacgcgttgggttcataaattgaaattcaagctactagcttcagattcattggtaccttcaagagatcgcaggatcatgattcggatttcatgagctcgggaaccttcttacacacccagagtattctctctgtcagataatgtgctttccgatctccgaagccgaattccacatgtgagggttgcggaaagtgacaaagctggtataactagaagaggaacgtagggcatcagcaaaaggtagtgggtgtggtgacggcagcaactgtacctcaatgctccaagtacttcaagttgtattcggaccttggttgagagcgcagaggaccgtcgtcctgtagctttcgggtaggtgcactcccacccatgttgtctgtggagtcctccaatacgctccgtctcatattgtagtcttccgcgttcgacgacaggttgtcggctgaattcgggccccaaatgacactgatgccatcaacgctgcccacatgggcctcgaggtagatagagttggtaatagccattttagggatgaggttattcacatacagggagcccgttctagaaatctccgacaacccaggtggcatctgcgacaccagcaacgggtctcaagctcttccacaccgatattgagaacggtctcggctggagagaacctagctcgtcgcacgagtttctcgaaagggacgactaacgggacattgaaactgcaatgcttcctcgactgagcacccttagcgataatgatacgttgggccttttgtgtttgctggttttgcccgttccattccagcctactcgagggttatgaacgggttccttttgttcagtctgagtgttaatgctgtattggtgttctctggtcggctccagccaaaactctgtacttcaaattcatgacgtccatgtactcccaatctgacctaaaagtgtgtaagcaaaggagtaaggtctgcgaacaggaagagatttacctagaatattccgcagtccacggtcgtcagatcgagtttcagccagatggagcttgggctttgaactccgccattgctagacggagagagtatcacaggacgcttgcaagaattcgtgggagaagtcatgcgtcgagtttttgcgttggcgtgttctcagttctcttccaggaagtaacttcgcctgtttaagccaccgaacttctcctggtcatttcggggttaatgattctcttgtagtcgtcttcgtcccttgagtggcaggccatattgtgtctggcaaatgctgctgttgcttggtccagctaatctttcggttacggcacgggtaatggggtgttggaattgcgtctattacccttagccacgtcagttgtttcagttgtggtcgaattgttgggtagtgaaacgaatagaatgtgagagtgtaggaagggtgaggtgaggcaaaatctgcaagctgcaaaacgattgaaccgtccaacatcaactcacacttggcgctatgaaagaagacgtccgcttccagctcgccaccgcatccaccacgaatgcaggctcccaacatcgcggagacgggtgtgattgtagtgctgcacctggttccgaatgggcatcatacataggacgtcagtgaaagccacggcctcacgggatcggtactctgcactcgggaggcgaggagctcaaagtcccgcgagagagaaccgttccatgtaaccgtcaaaggcctcagtcgtcaactttttgagtgcgaataaaacaactgcttctcgatttccatcagtagtagctggtgttcccgtctttttctagcatttatatagcatttccttaggtccacggctgcgttccccgggtatctttgttcaccttttttatgggactatccggatgtcctctttgagtgtcatcttcctcagaagtcttctggaattagatccatccagtaagcacctgcagggctctgcaccctatgtatgccatggaacatatcctgggcatggatgtattgcaatatgtaaggtccctaggtgtagtatggtgcctggacttgagctagaaggactatattcccaaagaggcaggcagtccccaccaaaaaagttcctccaaggttcctgcccgacttcgtttccccttgtcctgtgccaagattgccaagagatccactgcacttgagtcgggtctcttggcaagctcccccctttttcgtactcctgttcccctccaccctggccgccgtctctcatcctatgctttaacgcagccgcggcccgtatacgtgccctactgctcccatcaaattacacgacccgtttccgcgattcttgctacggtctcaaagtgcttccaccagacctcctccatatccgggccatcaaacctaacggagacttctaggctcagcttgtctccaagggggtaatcaaaatagtctatttcgccgtgaaacgcaggaagacacgcgcgacctcctctcgaaggaggccagaacgcgacgcgtcgatattggagcatggtgtcctatggaattcctagcttgggctctcaaaagtccagacataattgatcgacttcttagcgctggtacgtagagtaactatgtacagtaagagataaaccaatcgccaagttcgatgcatcatgaccaatcaaccacaaatgagatctgatattctccccttaaactctagggagggtaacgcgcaatgcccgaggggataagctcgtcgcatagccatcatgattcagtgcaaactcaaactctggaagaccgacgttgccatacaccaaggagtcgagtaaaatccacgaaaaacaggatccaacaaggggcccagcgtcttttggtgcactaagtgtatagataacagccaagaaggagatctttcctggcgtctcaaggccgctaggctgtagacgaatgcttatctcagagcgatcggtcactccttgcaagcccatcaaagactcgatcatgtcgaccgagttgctgatccatgatgagactaccaagccaaccccgtcatcggccgcgatggtaattgacgaattggaggagccgctcgtcaaagcatacgtacccccaaagcgtttgagagcttggtttctggcgacttcgtcaaacgcgggaagcataatatcggcaaccatctccccgattgtcgatgtcatcgcgtgggagttaccaccagcaactaaaactgtaaaaccggcattgtgatccggcgaaagaccaatagaactggaatacagcccgatgtctccgcccttggtgtacaggtcgacccgacgaggtgtcaaaaatgtatagatctcccagggcgcgcctacggaatgttgcagggatgacgtgtgtgttagcggcttcatccaccgccttgtcacggcagggtcaacaagggtgctggaaagaacggcgcggccgaatgtggccatgtcatttgcggaagagaacatgcctccagcactagcaatttgtaagttaggtatacatcaaacagtttattagcactcacggagcctcctcgccaatctcatatccaaaccaactgaaagtctcattgtgggggatcaccgccaagctagggtccgggatcttaagacaggaccgagtcaagttgagcggcctgataagacggtcccataatatttcttcgtagttggcgtttgcgattgactccaacgcgtaccccagaatttgatatcctgcgttggagtatatcggtgtctgtgaggttgaagtcaagggatctaatagaccacgttaggggtatacctagattcagaggaatcaccctactcacgcgcttttagaatgccacggaaaaattcttgaaaacatcccctctgtcagcaaataattcgagcgatagcgtgagcacacgaaattgacttaccttgcctatcgcacgggtactcactcccgcaagtcagccgatcgttctctggaagcgaagggaagcccatgctttgaagaagatccgacttgaatccgaggtcaccaaatgcatctagaattcaagttcagtttctttttcacattgcccactcgggtcatcggggtatgggtcgtcatacagtcccttgcaaggcccgcttggtggctagccagttcgccgattgtaacatcgctccattgcaaataattaattttgtcctttgcttgcgccgggctgtactctatttgcagctcaggcacgtatttcgagacgggctcgtggaagtaccgcgttccttccagagtcatgaagagatacattgtccacagctttgatatgctgccaattcggaacatggtatcctcgtctacctctttagcccccacagatccaactttaattggatcatctgtgtggtagaaaccgaatgctgaatggtcctcttcgctgctgaagacctgcactgcgaatgatatgccaggtagacttccatcctcgatggcttcattgagctttgaggtcagttcctcggctttgctggaaaaagtaggatcctctgacagagcggtaggggcagggaatgctggtcctaaaagaggacatcctgttgttttgatggcttcggctgagagcgccagcgccgataacgtccacaaggagcgcattatgaataggaatcaagaagttggatggatagacgtgtagaccagatccaaacatcgaaggccgggaaatgcatccttatatgtaggtccaatagtagaatgccagttgaaaaaaagggcattactgttttcctatctagggtctaggaatgtcttgggttacacccccggcaatggtactttcgaggagtctaggatagtctcgcgccagggtcaaactcaagttaactaaactgatatagattggtacaatcatatacaggcaaatgcagagtgacagccccaatgtcggaatcacagggcagggcgcaccgaaccccgcatagctagtacggacactgccccgacactaaacattccttgtcatcctagccattatagccgaccattaatgtgtagataattctgagcgctgcgtccgagcattcgcttccgttgcgaggcgggtacgatagtttagagctatcgcttagttgcatgagcgtgattgagcgtggtttgtcgttggtctgttgttggtctgttgttggtttgtcgttggccggacggtccaattagttctctacacgatgcgcgacttctgtttaatagcgcctagtgaccttggcagacgagagttctttgtatgatttcgaggggtctgatcggagaatttcccagatctcaaaggaacagaatcgaagaagccagatccgctacaatggtattacaaagaaaggacatgcagaggtcctgaagtcaaagtaatgtgtttcgtatctatgagatgaacttgcggctccttccctacgcagatttgtaccttcctaacacgtggggtatccaagtgccgtggtcttggcagattctacgtacataagctacatatgcacatacttaagaatatatgcatgagtatcaataactataataactataacttcaaaactataatgcagccgctcctaatggaggtgtatgaaattttgagatcaaaaagaataaaaattggggctcagccgggaatcgaacccgggacctcatctatattggtaattctgaaaccagagatttctcccgaaagatgaattatcccactaaaccactgagccgcatagtagataagatcccagttcaggactcatcagcaattccctcgatctactaattcagtcaaccctagaatgcaaacaagtatacgcaggtcaccataaaatgccagcctgcatatccccctgcatatgcccgaatcctaatccccaactaggatttacatgtcttagttcctcgatatcccccctttcgagctttcacatgaagacaagtcagtttgtattaatgaaatattaacggaatattctactaaaagatcctagctcaaccgtcttatttaatagtgcacccaatccatcccagcgaacccataacgtctaaagagcacgattgctcttcatagcgccggggaagttgtcttgaagggcttcccatagtggcttccctcccatctggagatcctggaatgccggacaagtaaggttgagcaaaggcacagcgaggatgttagtgacaaactccaacggcttggccacggtcgagtatatccctgcaagcgcgttggggctggcaaacttcagtacctcagtcacgaagcacagtaagttattatccttcagcatgccagccaggttcaagacaccacctgtcaaatcccctagatcaacccccgcaaagctgtctacttcacccaagtttcctccaatgctatattccaataatcattagaaatttatcagcgtggggagcctaacagggtctcataccttccgagttccggatatttcactatgaagtcaatgacatccaagttgagcgagataaggccgtagtccacaggagtcttgtaccagttctcaggaattctttcccacccttcgcggtaggtcagattatgttctgggccgtaaataccatagaaactccggagatggctcttagctagcatgggggttagcaaatctcgcatattcagtcggattccacaatctcttgagtcagcttactcagtgttccctctggattttcagcagagtgatttcggaacagtcgacctgggaagatgtaaccggcgttgcgcgcaatgagccccgtcacgggtccatagtagaaatccgggtttgtatgtatagtctcgtccatacggatctttgcgcgcttggccatgagactcatgtcataggtgccgtcggtggacatattataccaagccataaacttgtccatgttcagtgtccagctgtttccagtaacgtagaggtcgtcacgagtgttggaggagtctgcttcgatgaagttatgcgagccaatcaagccttgggattcgcctgcaggtggtgttagtgatcgaccgggatttgcaagcaggtgaggtgttcgaaccgaggacgccacctaagttgttcagcaggttgttaacgccagtatcgggaccaccgatggagaagctcggatcgagggacagcacgtcaccggtccagacggtgcccatgattgcaaggatggtggcaagatcgacgcccatgccatacactatacggaagatgttaggatgtgctgcatcgataatctcatgacgcaatggtacctttgttgattgctgcaatcacgtttgtgaacttttcatgcttagcctaggattcgacaccagtcacacgggaataacctaccgataccactccgctccgcggaatatacccatggtttgccagtgcattgagacctggacaggggcctcgctggtcaccgttttcaaaatccgggggttggaatgcatgttcgccggtaactagagttacttgttacaaatggtgacagctcgggggagcctttgtgccataccatcaacaggcgatttcatcaaactgaagagaaaccgcttttcatgttccgtcgtcggcttggcttggtcctggatgttggcatatgggcaaggcttgtgcaagccttgatgtcctgaatggccattcattgatccggggaaagccgatgctagggtaaggagcgacagtggccagaccagcagccctggagtgacgatgcgcatgatgagcgaatatgttagtcctccgctggaaattctagtttgccccggtgatctcaggaatcatgtaaagagcgactgaagaacacacttctaggggaataaaataatgagttctttagatatcccgcggcaattctgtgcctaggtaactcttcggatggtacggagcacacatgctgagaaatgttgatcccctgaatggccccgtcctagcgctcgagtccacggtacggagtagactatttgcaattatggcccaatggagcacatcgtagagacaactggccagcggtatggtagccgtattgcacagaatacatttgtatgtatatcgtaaattaacagtcccacttaatgtcaagagtcagcttcatccccccgctctttctttcgtgaagcattccgctgttgtacatctcgttctcgtttagcacccctgtcacaagctctggatagcgcagtatggagtacacgcccctgatttctgcatggccatttgtgtggctatatctcggctgaattatggatatatttgtaagttgatgctgatcggctttggtttgggaatgtcggaaggctcttgtggcggagatgaaacttggcgcatgcctccggtgagccgaatcttagcaaaggtctccttgataaattcaaatattagttcaataacttcaataacagtgcctaacagtgtctatcacagcaccacagcaccaggcctttgagctatacaacacaagtctttggatctgcacccctcaccaaatcccatcaaagcccgtaggttgcatgtatatcgtaaatacttcgtattgaagcgatctttccctcagatagcaggactatgggcccactttagataataggtattcggatcgtctccggggattcggagagacaaagggctagggtagtcattgttccggatcctatcccgcctgcgggtcttcctgtagacaattaggctcaattagaggaaatggaacgcataagcccgttccgagtagggccgagtgccaaagtcccacagcggcttgtcaggctctttggtttgctcgataaacatccagcccggtatttgtacccatttgtgggcccctaaaacgtctaaagtgggccaagagttggggaaggctcgtatctgtgtagatctcaattttctaattttctaattcagccacattcgcggctggaaccttaaaaagagtgaaagaccacattgggcaacttcacgatgggtcccaagagttatccaagactaccggctgaatggttgtatggaaaggttttgtactctcgtcgtctagtttaggaaatcccaaagatgtggactgcttccaggccacagttagatgcttggcagagagtcaaaacagttcccgcactgttaataacagatcggatgtctaaacatctagacaattacggagtactttgtagaatggcaatttttccgcgaggataaacgtgggccaccacttaatcttgaagcttgagttgttcatgcgctaacaatcccaacgtggaggtacatcaaactaacaaactcttatatcctagtcaagtgatcgtcatgtatctcataagattagattctcctgactcgcctggtcaaattcagtccaaatcctctgtgtcagtttcttgatcacgaatgcatcctctcctgtagtcttcacaatgcgtttgtttggtgcagcagccctcgtggccgccttgttcgcagcgagtgttatagcagggatggaacagttggcggccgttttaccctcgtgtgcggtaggtatcttcaatctttctatcgctcctttggcgcgaggttgataacactgacctatgaagctggattgcatgacgacttcggtgtcacaatcgtactgcgagccaaccgaccagaaatgtctatgcagcgatgcacattacacggccgttctgcagaaatgcgttcttgtcagttgcacagttaaagaatctctaagtgagactacgtttcatccttgatccccactggtcatgactgctaacatatgcaagctacaaaaaatgtcacctcaacagcgtgcggggcccctatccgggaccacacaaagattgtttcccatgcaggggttgcaggtggaattgtagcccttgtggctttcattcttcgcatgctggctcgattaagctgctgtggtggtatttctggcgcggatgattggacaatgatgttgacggtggtatatacaatctcccctttgctcgaaaccgattttccttctcactggaaattaacaggctcttctcattccactttctgcactctcagttgtctgtatggttccccttgcacctggtgaaaccatcttcacttgactaacaattcttatagtggccgattcaggtttaggaaaggatatgtggacccttcctttcgacaacatcacccatattctttatgtgagtactccacagtcctggcttgatgcacttgccaaggaaagttgtctaattgcaccaggtctacttttgggatgaattgctctacctgagtatcctgccgctgaccaaaatatcaatctgcttcttctaccttcgtatcttccctgaccagagattccggatagcaacttatgtggccatttcactgaacgtcggctactggattgcctttgtcttgatctcggtgttccagtgtcgacctctacccggagcgtggcaccgctggtatgaagaagagaattataagtgcaaccatatcaatgcacagggctgggcagcggcagtgctcaacatggtccttgatataatcgtcatggtgcttccactgcgccagctatatggtctaaacctttccgtgaaacgaaaatcatatgtgatgtgcatgttcagtctgggcatcttgtgcgttccctatttcatcctgctccgcaatgtcaataactaactcttgagcttagtgtcacccttatcagtatcctacggctgaattcactgattcacttcgcttctaccactaacctaacatgtgagtatatctttttcttccccttcccctttcaacgtgggcaattgttaacatctataaggggattacgtgaccgtcggatattggagtactatcgaatgcgacgttggcgttatctgtgcctgtctgcctgccattcgatctctactgcgtcgtgtatctcccggactctttggcgattctgctaaagccaagtcgtcatacgctatggactctcattctcgcgggaatgggtcccaatttgcagctgttcctgtccagaataagaatcctggtcgccaattctacccgctggatgacatagatacctctgatgaagcccgtctacaccacccacacccggtgtagttgagggcgaagatgggaggtcgttttatgcagggcaattactttcattcccttcattttctttgcattatatatctttgtatttattcatgtaactgtcggatcccacctggacaccgaagtacgatgtctctctttgatgtctatatttttcagatatgtattcaactgatcactaaccaataattattccgaactcacattgtactttctttcatatgaatttgaccccatataatgtagagaataatgcagcaggctttggtggaataggaagaaagcaagatagcatcactatgctgtacatccccagttctgcaccaacaataaggggctggagctttcatggagtaatactttacacgcttttaccatttaaccgaagagtgagacaactcccgggaaactaggttgagttaggttttggatctcacaatgagagtggatatcaccccaatccacttagtcgttaatgtggcttacctaggtaggggccggacgtctacgatgtactccacgcggccccctgtatcattgttacatataaaagacatgaacacccaaataagtctagcttcaccgttaggttggagtttcctcggggggctgtatgatcggcatgtcaagcggcagagaagacgctagcaagtcggcacgagtggtcaggatttacaatatatattgattggctggccagtcccacaagcgaaaagtatcaatgtccatgtatactttgccaagttcaatacgagtcagaaccattgttacttcgtatatacatgatttataggaatagtctgttactaggccgcagtggcgtgctgcgggatggctatccatgcatgatacaggctaatgcacaaagtggaagcttatgtcgatcgccttcacgaggaaattgaaggaatatgcccaacaacgtggccaaatatcgtactaggcatgcccgccgtgcttttgcttttatggtcttgtgttagagtcaggagaagggtttggtggtcattaatagaccccgaatcggttctttcgttgtctgtttttgcttgatttcgtttcgtttcgttttgtttttttggttgcttttgattctcggagaacgtctccgtcttttctcctttatgcgtttctctgcagtagttggactattgtccaccctttcggtcgtcttggcttcgtaggtgcacctccagtctccggcgtctgctcggatcttgatgacacagaagactaacgccggaatccagtgatcatggacaccataaattgcacaagcggtcttcggataacgagaattccgctactgagtatgattatgtcgtcgttggctctggtgctggaggcggccctgtagcagcacgattggccattgcaggatacaaggtgcttcttctagaggcaggggatgaccagggaaatgcgacccagcagattgtccccgccctgcaactccagtccaccgaatacgaaccgatgagatgggattatttcgtgaaccactactccaacttgactcgtcaggaagaagactccaagatgacttatcggactcctgccggcgaccttcatgttggaagcaatgcgcccaatggctccgagcccttgggaattttataccctcgagcaggcactttggggggatgctctgctcacaatgccatgatgtaagccatatcttctcggtgtctattcgacgtgactatcatatgctgaccagtgccttgatagtactatctacccgtacgagaatgactgggagcaactggccagtctcacaggcaatgattcatggtccgcctcaaacatgcgacaatactttacaagactagagcgcaacagatacctgcccagcagcttggtgggccacggattcgacggatggctcacaacgagtcttacagacttgcgtctcgtcatcgaagaccaaaagcttctgtccctgatcctggccggtgcgaccgccgcgggtaaaacactgttgggtaaactgatcaccacggtcacgggccttgcagaagtcctgctgcgcgacctaaacaacccctccccctcacgcgactacgaggagggtccataccaagtgcctctcgccgtggatgttcccgagtacaagcggacaggccctcgagaattcctcatgaagacagtcaacgctgagaacccggacggttcgcgaaaatatcaccttgatatccagctgaacaccctggtaacaaaactccggtttgataccaccggcgctaagccacgggctaccggtgttgactatcttcacggacagagcctctaccgcgcagacccccgggcatcccagacatcgtcgaacgggacaccaggtagcgtgagtgctgctcgtgaagtgattctgtctgctggctcgttcaacaccccccagctgctaaagctgagtggtattggcccaaaggaggagttatccaaacatggaatttcaaccctggtggatctccccggcgtcggtcgtaatcttcaggaccggtacgagacaggcacagtgggcaagtcacccactgattttgtcctcacgtccaagtgtacctttttgtattccctacccgacccctgtctcgaacagtatgagaacaatcccctcttcaaaggcacctataccaccaatggaatcgctattgccatcatccgcaagtcctctgtcgcagaggacgagcccgatctattgatttcaggagcacccgccaacttccccggctattatcccaactactcctacgaaggtctcaaaaatgctcagcattggacctggatcacgttgaagtcgcgctcccgtaataatgctggcacggttgagctgcgatctactaacccgcgtgatacgccccttatcaacttccactcgtttgattccggagtgactgcagatggtgcagatgagaaggatcttcaggctgtgtacgaggcgatgcagttctcccgaacgatctttgatgaccttattcccctcgatggcgggtttgaagaggtctggccaggtcccaatgtcactaccgagagccagatgaaagacttcattaagcgggaagcatggggccaccatgcctgctgcactgccgctatcggggaagatggggatcctcaggctgtgctggattctgacttccgtgtccgtggcgttgacgggctgcgtgttgtggatgcttctgtctttcccaagattccggggtactatatcgccctccctatttatatgatcagtgagaaggctgctgaggttatcattgctgatgctgtataatattggtgctggcatcttgtttgcaatcctcattggttgcttttctctttctgttgtctgtgaccaatcatctgccattcttgtataagttctttattgaacatttctgatgagtgcctgaaactctcctggcctcgagcctttatgcaaagcatacctgttggtacctttgttttgcacaggatgacatctagtaaaggacacatctaggacattataagagtaaaatgataatttctacctcttaaggcaatgccaaggattgtatagtaacacctggacaccaagtagatgcaaattattaccaaccaattattcaaatcatatacatcatgcagctgtagccagagcaataggtgcagcaataaaaggttcaatctcgaatcgcatctgcggcgtagtcgaatcgcaccaagtgacgatacgagtgatctgcatcgtgcccctagggaacgaagaaaggacaagacaagccacagctttacccaacttcgtaccgagtagttcttgatactcagcactaccatgtctaaataccatacaatttacctctcctgcctgtgaccatccaacaccaaatctggggtagagttcgtgacgtatatatgcacctgtctcttcattcccgatatcggtaaacacaacatgtctcagagtattcaagttaaaatcaagcaagtattgagcccgagcaacctcattccaatgaggaccgttccccctataaatcctctcagcaacaagaacaccacgagccacccgatgttcatattcgttaacctcaagcgtgtttggccccagctcccttcggagatatgtataccggtatcgcggacccccgcgagcaatattcatcgattccacatcaccaccttctagctccacgggctcgactgagtagtacgattcatcgattgtccaaggcattggctgtgctttgtcggtcatctcttctatagttaacgttgccggttggattcgacaacccggctcttcgggatcgtcaatccatgcttggtattgagctcctttgtttctgtacctcgtgacgtccttcatagtcggttcgaccccggttattactcgcccacctgcagtgtcggatgagccagcaagacgctggcgtttgctgcccctggatccgtgaagacccctgtatacggcatcggcacgtgcttgactatccagggatcgccgacgtcttctgtcgcttgaattggtcgaccctgatcctatggaatattggggttctttgggttctaccgatacatcgtgcatttccacgtcttcaaggttcagatcgagactgtcttcgtcagctccgttatagacctcttcgtcggcattgtattcacccggaccagacgtactcacgaaaataaagctttctcctgaattggggagtgattcatgatgggacttaatgaggctggcaccactcatctcggaagtaatgcctttgtgtgaatttcttgttgcgacggaagaaaagttatcacctgatgaagtcgcgttattggaatcggcatcacttacctcgggtggggtgtctgtgtctgtgcaggaattgctggttgagaggggatatgggtcgtcaaatggagactcatcgacaagtttcgtctcactcatttcgggtgttattcctttgtgagacccgctggctcggggagcttgggggtaatagtcatcgctgctatcctcatcttcactgtcgttttcatcttcactgcctcggagctggttagctggggccgcccctttgaccacattcttaggaagtggttgacgcagggcgcgtcttggtgccttttccactggacggttaggccgggctcctgaaggctgactgtcgtcgtggcaatcgcatcggcgtcttggaaaacatcttagtgagtgacgaatcctcttcaacattgtggtattctttgtgtaagatattgaagtaagataaaatgtgttactgatgttcttgttggataactgaggttggagtgaagaccaggggacatgcaaaggggaattatataggcaacgctgaacatttgaatggtctttattgaatttattgttagctcgtcgtgatcaagcatgatgttcaccagaaatagggccaaggaataaagagacaaagaatgaacaatcaacaatcaacaataccccgagggtcatggacgagggatccaaacatagccttggaagacaatgagactcgaagtggagtagcttacttttggaaaacaataggtccgagaatttctcaatgataatgacatggtatgttaaagatagtaagcttggaaccgacagagttgcaggaatagaagacaaagaactcgacttggcgttgttgaaagagttgccaatgccatctcctacagaaactaaacaattacattatgttgaattggatgtataacctctggtatatcatactatagtggaagagaaaactatgtttgatttcctaatcgggacgatatgagactacatatgtacctacaacataggtacgtgctgttcagcagcggggagatcttaagagcaatcaattacttcatagaccgaattctttacttaagtgttcatacgactcttagcgggaaatgaatgaactagtagaaacttgacattcttgatgggctcattctagtggcctcatatatttgaattgtactttagtacaacccattccatcatcatcatcatagtatatacagttggcaacgtcgcaataaatttaatccataatttaagcattctccttctgatcaatagcacccttctcctccgtccgcatccacatgtccacctcagcagcctcaccctgaggcaggtgacgagccatggagacaatgtcccatgtagtcggagcatcgcgaaagacatggttcagagcctccaggttgcggttcatggtctcggggtagaagaggtaaaccgagatgggaatgcaggcagagatgacagcgtacacaatgtagtacttgtatccgatggtatcgagcgcgacaggagtgatcatgacaaccacgaagttccacagccagtggtttccagtcgagatggcggacatggcgacacggagacgcatgggagcgacttcggtacagtagaggaagttaccgcccaggaaaccaacaggataaaacgtgttgaaaaggaagatgaagacggcagaaacaatcgacgcgtttctgttgtccttgaagctgttggtgatggcgaggactatcatgcagacagacataccagtaccgctgatcatgaagatctttcggcgaccgagtcggtcgatggcgaagaaggagatgaagctgcagaagaacttccaggtcatggcgcatgaagacagaatgcgagccaggtcgctgctcatgttgaggttttcttcgaaaattgtcgacacgtatgtcgagatcaggttaccaccacacatctgctggaagaattgcaatgcgacgcacagacagaaccggtagataaggcgctcgtcgtcggccttgctggcggtgaagatttccatgatggaggcgctgttgaccgtactctcgagggaggtctcgataccagcgatttcaacgcggacggcctcatcatcgtcggacagacccttgtacgcagctagactgctattggcctcctcgatacggccaactcgcacgagccatcgaggagactcgggaagcaagaagactgaaagcacgacggtgagggagaagaagaaggaaatggccaacgggatacgccactgcagtgcgccatcgactttgctcaagccaaagtcaatccagttacagaggacataacccaaacagatacagataccgtcgacgacaacgtgttgtccacgatgtttggcagacgtgcactcggactgccagacgggaacggcaacactcaattgaccgacaccgacaccgaggatgacacggccgacgacgaattgtggcaggccataagccgcagtctgcagcagttggccgatgatagtaaggataccacccaggaagatagtcttgcggcggccgagtcggtcacccaggaatgtacacgacaaggctccgaataaagcaccgatctggaaggatccgatcacggtacccttgtttgtggagtgttgcgcgtgcagggcaccctctgtgttgattgtgtcgatctcggggaacacactgacccagctctgcaatgaagccaaaggggccaggccagactggttataaccgaagacgatgaaggccggtgctacaatgagcaatgcctgcgctacgctcagcgcctttcctcgaaataatgtgaacatgttggagagtgtctaggaaaggccactcttgagggatgagagaaacgaagagagaagggaggccggtctttacatgggtttataccctgctttcggtcaacccttctcgtggagaccccgcatcacgaaaattaaaattctctgtgggatggagaatcccacagtggatagaatatatcatagctgcatagagtatatccaccatggtggcaccttttaatcaaattttcgaaaaaaatgttcgactgtgacttggtcacatcgccgactccacgtagggttggtcccggtgtacaaggatcccgcgccttcgccactcccgaatcaaaaagtcgcttaaatccgagcgattaggaccgaagatgcgagttaagtggcgggatgatatgggctgtccagggctgattggagggaatgccgaatatcggagacgggtttccgaacccatgatctccacgttgaattataacacgggatggggaaggtcgtgtttggggtaaaaaagtaaaaggtaagaagaacgaataagaaatctccgagcaatgccggcatagaacttcggtttggttccgatgccgctcattgcctaactcgggccgggctcggctttgataggccagtcaaaggcttgagctagccccaaatgcttgtccacccctgccaagtgccaagatatagtagatttgacttcaaatctcacctggggatgttgaggggaaatgcacatctcggttactctccggatttgtccgggcacgctttcttccaaggttacagatcgtgattgtgtcatcgaaacgaaaaagaaaagggaagtctcaacctcatcgggtgacctacctaggtacgttctcgcttatgatatatgtctgttgtacttcggggcattcttcggtggatactttcccgcgttctcagtctccgaaagatgtccgggaaatattgttgagaagacttgggcaagatagctccacaccgtgaacgtatttggctcacccgcagagatttcaacattatttgcgggggtctactaggtgtctaggatgataaggtagaaactctgaccaataatcaaagggtgaattgtgtaagggtcagcgaaatttgtctaatggccaaaatgaaaaaatttgttcgcatctacaccgcatatctaggtagcttccaaggttggagcctcatccagctctaacctacccgagtaggatatttctggtgtttctttgtctctcgtgaagcgcttacattatttgcatctatcgaatccgattgttgaccagaaatacatagacccatccggctaatccccggtcatgttccagaattttattcacctacgatggatatggatgcataagtcggagaaaaccctacatcggttaggcacggattacatttgccgtctgagtcgttccggtctcggtaattctgagcccttcccaggtggaggattcatattattaataattcgaattggccccggagactaaacgcgtcatatccatgtggtttctgtgcgtggcccagtttccccctatggagcacgacatttgaggttcgactttcatttcccttcattaactcaatgtaccatcttatcctgtctcgactcatctacggagtacaatgagacagtatcgcctgctacaagctcccgggtcttggaagatatcatccaaattgcattaaccctggtaagagtctctgccaaggcatataaggctattcgggtaaatacgatttgggggcgaattaagcacaaaccttggcattttcccgagagtcaaatcccacttggagggcacctgggcactttcaaggttcagagtctaatgtaaactccgatcctttattctcctcatacaacgtacggagtacaagtctggtatgtctctattctttaattcatgtagcaaaggcattgtctctgcttcttttaatgtcagaccactttctggtccctttccccaatcttggaattcgaactaccctcttgtgttgttagaaaaccaaaatatattccgaatataaaacgacactccatctacaacatatgattaaagatattacattgaaagttaatgagatcgtcggctacaggattcaactgtgcacatgaatataacagctagcagaagagataccgcatggtataccgttcgaggctcgagaaagctgacatcataatattagcagcctggtcctgcactcccgaggtgcaaggctagaattacctgtcggttctaccttacctagccagcgtggccatgtcaatatctacttcagctatgtatctctctttgggctgatctagctctgttgtgggcgtaaatttgactagatcgtcaactatatttgaacaaccatatcaactaaacgccggtgtatacctgggcaagtgaccacagccagtttcatcgagtaggccttgaccgcctagtatctctatgattccatttccacggcccggttcttaagcccgataaagtgggcagaataaaaggcggtcgggaatcaacgaattatagtttgtctggtgctgagatgacctcagcttggcaattaatttctcgctcgtctttaccctaccacacgagttcacattgttgcagaccacaatggacccccaagaagataccgtaccaaccgagcccctatttcgtccagcgaaaaagcgcaagttcatgcgacggcgtgccgatcctgagctcgcagacaccgaagaggccgataatcaagatgacaatcccagcgcctcgcaagctccagggagcagtaatattcggcggccacgcgcagttcgaaagggtggcattgggttttctaccgcatcacgactaggagatgatcaggcccagcaagtggcgctagtaccagcagtcggagaaaccgaggacgagaagatacgagcaatgaatgaacgtttcacaggatataccggtcagacagtggatgttgacaagcacatgtacgaatcctttccttcaactgatcgtcccgcttcgtttgatgtgggctaacgagataaggatggcattcatagattccgagatggctaagcgctaccagcctgaatcaaatgcggatcattcaggccgcaaccaaccaacccaagcggaagtcgccggggggctgtcagtgtctggacaccagactcgcgaacctgcgtcgctaggaaaactccacgaaatcgacctcggccaagaagccacattgcgaaatattgcgcggacagaagctgcgactcgccaaatgaccgagaagggagaattgccaaaatcagcagatcacgctacttcagagacgggtcgccctggtcaagatggcaagtcatggcgcaatcgcaagcagaggacggaggcagacatcgcaagagatcgtcttgtggaggaggtactacgtgagagcaaatgtgtgtggaattcaaatggaaatcttgcatggtctgtgtcttttctaacactctgttatagtggaaatttacgatgaacatgaggaggaaacccagatggatgaccaacaggctgccgatgaccgagtcgctgagcagttcagacgagactttatggatgcgatgcagtctcggcgtcggactcggcccgcagcaaaaccggtggccaatgttgaggggcctcggggtccgaagcttgggggcagtcgcagtgcgagagctgcaatgcgggaaaaagaagcacaggcgggaaaaaaatgattgttattctcgtctgaaacggctggtttcttttgatatgtacttttatgtacttggtcctctgagacatgtgatgtgtttttactcgatatgcatacgataccataatgactttgcgccaatgctatttctgactatctttttggagggctagttaccgactaagtcgcgggcgggttctaatcgcgggtgatctacaatttgcggccaattatctttatccttctggcttccatccccaggaagggatgagcacattgtagtattatttcaagcataaggtctgcaggattatcccaaaccaactagatattcaatttagcaaggccttgctttggcaaagacaaaggcaaaagtcgactaaacgactgactatttttgttgactatagttatatatttctagtgacatgccaggcaaggcatacaccccaataagccgaatgattctttcgtccagacgtcaaattaacatacaagagcatcaggacgtgagaacgaccttgaagaaaaagtgaaatggaaacgacatcttcaatgttcaatgttggttgttgtgtgtgtgcatcgttcagtatagatcatctttgctccgttgcagattacacctcaccaacttacctttactttctcatatggccttccgatatggacgttcctttcaggtactctatatatctccaatatttaatcataaaaatgatccagggcccaggatgtgccatatgtacctaggtaaggccctgaaactaccttagtcagcacccaagtccactggagatgactaagcctgatcgtgaactgcccgtttgggtccaaagccaaagctacacccgcaccaaaaagacccgcccttctcctgcctccaaccagcccctctgattgtccgtccgatacgcatggtcacgtcttgatttgtccccaggcgacttaattcaaaatattcacatgatccttgtgacagctaccgcccttatcctagatatacctgcacaactttcgcgatgaacccttctaacccacctcaagctgccgagtatggtggaggtatgtgatcccagatatgccatcccaattgcgcctgctattgcaatcccaaagaactcttagatgctacttaatgcgcaggatactaattatcgcactgtagatgaggtgtcggctattgtcctagacccaggatattcaaccacccgcgcgggctttgctggtgaagatgctcccaagtcactcatcccaacctactatgggaaatacaacgccgacggccaagagaagctcgtatttggcgacgacgtattcgttaccccacgccccggtctgtccatccacaacccgattggcaaggatggaatcgtcgaggattgggatatggcagagagagtctgggagcactcattcacgtcgcgactcaccggcacgaaagcgggcaaccccttccagaacggattaaacgacgtttccccagacgagctccctacggaaatggaggtggagtcagaggagaagcctttgtcggacagcccattgttgatgacagagcctggatggaacccagcaaaggcacgcgaaaagaccattgaaatcgcaatggagaaatgggataccccggccttttatctggcgcgcagtggtgttcttgctgcgtacgtatatcaggcctactgtaacatgtctaccatttgctgacccaattccatgcgcagtttcgcttccggcaaggcctccgcccttgttattgacattggagcttccaacctctctgttaccccgatccacgacggcatgatcctgaaacggggcgttcagcactctccgttgggcggtgaatacatctcgtcgcagatcagggcaatcttcaaggccaacaccccacaacccatcacaatcacgccgcattaccttatcagctcgaagtcggctgtcgaagccggccaaccggcccaagctaaatacaagaccttccccgcggacaaggcacccgatgcgtcgtaccgtgctctcctcgaggagcgcacactgtccgagttcaaggaatgtgttgtccaggtttggcccgggcctacaaggctctcagcccccagtgccacgggcgtctccaacgaagatatggctcgaactacccccggtcgcccattcgagttcccggatgggtacaaccaagtcttcggtgtcgaccgtttccgcgccgtggaatctctgttcgatgccaaggctgccattcccgaccccgactcgtctttccctcccccaacacccgcgcagactatcccggaacttgtcaaggcttctttggccggtgttgacgtcgatctccggccccacctgctggctaatgtcgttgtgactggtggatccagcttgctttatggcttcactgatcgtctgaaccacgaactgatgcagatgttccctggccccagggtgcgtgtcactgctcccggtaacacctctgagcgacgcttcggttcctggattggaggaagtatcctggctagtttgggaactttccaccagatgtggatctctaagaaggaatacgaggagcacggaccgaacattgtagaaaaacgttgcaagtgatcccattcttcgcatttcactcgtttgtttttttgctttgatgttacgggcgttactgcgctactttgggcgcttcaaagggttttgagcaactccggatctggcccgtctgcaattgaagggcctaccaaactgatctagatattttgtgtacgactaatgccactttatttgatttgtctgagaataataagcaggacatggtatattccacacaagcagtgtcgatcagtatggtgtagctatgatattgcaattttctacggaattatttttccggctttcatacaatcatccacaatatgtgattaatgtgagatgcccattggcggggatgcgtattctgcatcgatgcgttggcagccaacacatcagtggtccgtgtttcattttatttatgttggccatgcccaggttggactttctgtcaatttccccctatgaacattgccgaaacattctattacatatcgatccaggaaagaaatcagggggaaaagagatgaagaaaaggaacagagatcaaacaaagcgcacatgaccattaacatacatcatcatcagggactcgagcatccatgagcaacaaggaaaaaaagactacatcgtcaacatcgttacatccgaggctgcgggccaaacatgctagagtctacgggatatgaaacaatcaaaatgcgagacagttgagggtatgaaaaacaaaagggatatcgcgagtcaaggtccaaggtcaatgctagcagacagagggacaacatcctcatcgactagctcgagcaatgagccagtgcaggacagcgtcaagattggtctcttccttggcgctgataccataacagcttacttcgcgatgagtgatagatttcaaatccatcgcctcgatgatctcatcaatagacagcttgtctggaagatcggacttgttcccgaggaccaggagggggatgctatgcagcgtgggctttttcatcaggtcgtgaagttcttctgtcgctactgggagtgccgcgcggtctgctgcatccacgatataccttcgctttggttagtatgccaaccggaagggggagaggacactggaaaggaggaaatgaggaaataagccagtcttacacgatcgcgttgacgccccgacaatagcgttcccacatcggccgaaatcgaggttgcccgcccagatcccagctgcggggatataattagcgccgccgtgcttgatcgggaaggatgaacataccatttcaaagtcacatggcctttctgcactcttttggtgttgaatccaattgtcgggatggagctataaggaataggaatcaggacatgggtccagatgagttctcagatgtgagaccatctataacttactcgacagtgaactccccaccctgttatggtcagccgggggacccataaggacattatcagatcgacttaccgccaacacacgcagcagagaagacttgccggcattctgaagaccgatcatggtgacatccatctcactggccctgtatggagtcttagctgggcttcatctgcggggacgggccgtggtctcccgagaactgcatctatcaaacggcccacttaccagaacatcctcagaagccagtcatagatagcacgaaatatgccggccatgacgaagagagatatggaaaaaggaaaggggggaagaacaagaaaaagagaaaagagaaaagagacagtatagtagaatagaaccaaaaaagaaagaaggccagaacagatgaagagaaagcctgtggaaaaagctcaggatgacaaaagccagagaatgcccaggtggggtcaaccttgttaactgcgcaacttgatatttcttgttgatctcttgattcgagacagatagaaaaagcaagaggaaaaggttagaaagaaaaagaaaaaaagaaagaaagaaagaaagatcgtcacaccgtaacaaacccagaaacaacaatttaggcctattattagagggaaaggaagttttaaggggataactgccggcagatgtcaataggaaaaggatattggatctacatatgtactattttctatggagaattgaccgatctacctacacacatgacccgagggcgcttagcctcctcaaaatggagggggtttcaatggcgttgtgcagcatattcagcccgtgtggcgtttacaaaaaggtttgaaaggtttccacattcctgatgatgttgcaagtttaatctagagttgactaggattagggggttcaagagcatgtcaggaacttgcagttgaactagagtttttagtagggacagatgggatgaacggggcatgaacctcttaaaacgtcgaacttttggaaacctcaattgggcgcctcaggccataatgcatatcaccacgtgatgataagcatccggctccaccctcgaaaaatttccccaagcagaacaggccttctcgtcttttggcagcctgccattgtcggttgaattcctgtggtcttatggctgtatgatattgggcggaggaatcgaaccgatattgtcacgttttttatcttttcattgacggtcacatttattgtgccgtttagtccatcttttttttttccctataccgcatcaaccggcttttaagagctgcgattttccatcatggctcccgcagccacagatacccagtggtcagtcgaatacgacaccctgcgacgggagaacctgttcaggaaccctcccacggatcacacggcttatccatcgctggccgagtcgattcgaccgcacatcgattccttcaatgctctcttcgaggacagcaagatcctcgaggcaggattgagggatatcggtacaaagaccttcctcgatggtgaactagagacatatgagcagaagaaggcccgccaagcagaaggcgttcgcccgcctaagcggaatcgcttgaacgtccgcgtgcgtgaaatcttcctcgaaaagcctaccctgccccccaccaacaaatacaccacccgaaaccgtgaaatctacccctcggaatgtcgagagcgccacgcgacgtaccgtggtaagctccgcgctcgcctcgagtaccaggtcaataatggagactggatggagtctgtccgcgagctgggtaatgttcccatcatggtgcgcaccaaccggtgtcacctcgaaaaggccacccccgacgagctagttcgacacaaggaagaatcggaggaactgggcggtttctacatcgtcaacggtaacgagaagctcattcgtatgctgatcgtcggcaagcgcaactaccccatgtccattattcgtggttctttcgtcaagcgtggtcagacctacacgaagttcggtgttcaaatacgatccgtccgtcccgatcagacttcgcagaccaacgtgcttcactacctctccgatggaaacgtcaccttccgtttctcatggcgcaagaatgaataccttatccccgtgatgatgattctcaaggcacttgccgagaccaacgaccgcgaaatctttgaggccattgtcggtgccgcttcctccaagggcatgtccaacactttcgtcacggaccgtgtcgagcttttgttgagaacctaccacgcctaccagaagcacagccagtacgattgtcgatctcacctgggcaaggctttccgacctgtgctcggagtgcccgctgacatgcccgatgaggaagttggcacagagttcctccgcaaggttgttctgccccatcttggcaatgagaatgtcaccgagtcgcaagattgggacaagttcaagttgattacctttatgattcgcaagctttactctactgttgcaggagactgtgctcccgacaatcccgatgccgtctccaaccaagagattctgcttggtggcttcctttacggaatgattcttaaggaacgtattgaggagtggctccgttcattcggtcccattgcccgcgactggtccatccgcaacaatggcgcaaagttcaccgatgaagcgtttgaacgagacttcctttccaagatcgtcaagcgatcaaacgagaacattggtaatgcgctcgagtacttcctttccaccggtaacttggtcagtcctacgggtcttgatttgcaacaaacttcaggttacactgtaattgcagagaagatcaacttctaccgtttcatcagtcatttccgcatgattcaccgtggtagtttcttcgctcagttgaagaccaccactgtccgcaaactgctaccagaaagttggggcttcctttgccccgttcacactcctgatggatcgccttgcggtctgctcaaccatttgtcgcacaaatgtttaatcgccacagacaacctggatgtatctcatctgcctcgcactttggttcagctcggtgtccggtctgagtcttcagtggctctggacgagagcgtggtcgttcagttggatggccgaatcattggttactgctcgcccaagcaggcccagagaatcgccgataccatccggtactggaaggtcgaaggcaaaaacaacatccctcgtgaattggaagttggatatattcccaactcaagcggcggtcaatacccaggtgtctacatgttctcccaatcagcgagaatgtaccgccctgtcaagtatctggcgctggataagctggattacgtcggaccattcgagcagcccttcatggagattgcctgtgtggagtctgacttgatccccggtctttcgacccatatcgagttcacgcccacgaacatcctctccatcgtcgcgaacatgacccccttctccgactacaaccaatctccacgtaacatgtaccagtgtcagatgagcaaacaaaccatgggtacgcccggtacctcaattgctcaccgtaccgacaacaagctgtaccgcatccaaacgggtcaaacgccaattgtgcggccacctctctacaacgcttacggtctggacaacttccccaacggtatgaatgcagttgtggctattatctcctacaccggatacgacatggacgatgctatgattatcaacaagtccgcacacgaacgtggcttcggtcacggtacagtctacaagaccaaggtcgtcactttagccgagaacgactcccgccggaacaagtccaagcgggaggtcactaagctgttcggattcgcccccggcgacgagatcaaagaccaggtgcgcaacaccatcgacgaagatggaatgccgcacctgggtgctcgtgttaaggaaggcgataagatcgcggcctggcacaatgtccgctttgatcccgcctccgactcgtacgtcaacgtcgatggagtcacccactatatgaaatacaaggatgccgaggaaggctacgtcgatagcatccgcatcatgggttccgagtctggcaacgagcctgctcaatcgctcagcatcaagtaccgcattccccgaaagcccgtcattggtgacaagttctcgtctcgtcacggtcagaagggtgttttgtctcagctctggcctgcagtcgacatgcccttctccgagagcggcatgcagcccgatctgatcatcaaccctcacgctttcccatcccgtaagttccactttctcttaacaccaagtatattcagccatctaacccatctcaggtatgacaatcgctcaaatgatcgagtccatggccggcaaagccggtgccatgcacggtctcccgcaagactccactcccttccaattctccgaagaaaacaccgcaaccgactacttcggcgagcagctccgcaaagccggctacaactactacggcaacgagccgttgtacagcggtgtcacgggccgcgagttctccgccgacatctacatgggtctggtctactaccagcgtctccgtcacatggtgaacgacaagttccaagtgcgtacgactggacccgtcaacgcgctcacgggccagcccgtgaagggtcgtgcgaagggtggtggtatccgtgtcggagagatggagcgtgattcgctcattgctcacggtgcggccttcttgctgcaggatcgtctcatgaactgctccgacgcccagcatacctggatctgtcgctgctgtggctccttcctgtctacgcaagttgctgtttccggctcgtcccgctcccgcactgctatcaacccgggtgctgcggctgctgctgccaaggttgctcctaaccagcagagcgctaatgctcatgctggtgctgcaattggtgctgtgggcggtgtcaatgggtttgtgcgctgccgtcgttgcgcccgtgaggctaccttcgatgactcccgtgctgatgtctgggaagatggtgatggacaccgctacgtcggcggtgacgatgttaccatcgttgctgtgcctggtgtactgcggtacttggatgtcgaattggcggccatgggtatcaggatgaagttcttggtgaataactgatatatcggtctctttaggatctaaaaattgtttccttgtttcaatgtcataggtggcgtatacctggtttaatgattatactcatctgcttcttgtcttatttttttgcaaatattcttttgtgtacgaacagcatttcctagcagaatcagaagtgtttcaagaaactggccttcgtatgggctgctcccagctataatcttctctaccaagcgtgccacgatctcaggatccaaatcaaacaaggtaaatattgatttcactaataagtgccataatacatgtcaaacttgctatacttccagtacttccagatattaacctcaaaccgagcctttctccccctcaagctcactctgcaccaaaccggtcttcgcagacgggaactcccttgtgcgcaccttgttctcaaacagaacatccaactcagcataagagcgacccttgggctcaggaagtctaaagaacgaccaaacaaaactgcaaatgcacagcgcaccccagaagaagccagacttccccctccaattccacgcatccacattcagcatatacggaatgataatacccgtcaccagattgagcacgttatacgtgttcctcgccagcacaaccgtcttagtccgcagtctcgacgacggcatctccgaaacgagcgagaaacacacaggcccgatagtcgaatcatagacgaacgtatacacaagcaacatagaacccgtcgcccacgagagcgacgtcgtcgccggcgcaatagacacaaacccaataacaaacaggataaccgccagaaccgccaaaccacccacatagagcgtgcgacgaccaaagtacgtcataaacagccacgagcaaaacgtcccaacaactccaatcgcatactgcgccagcgacatagtgaacgactgcgagtccgccagcccagcacgctgatagaagacagtcgagtagcccatcagaccgctaccgcacagactctgcacggcccacacacagcacgcgatctccgtgcgtcgcaggtccgtccccttaaagcagtccagatacgaggcgccggtctcggtctgtttctccatggcattcgtatacacgatcatcgagacggtttcctccgcgctgaaattggggtctgcgcgcgtgagccgcttcacagacttaatggcgtcttcgcgtctgtccttccgcacaagccaccatggactctcgggcgcaaagtatactccgatgaagatcggcaccggccacgcccactgcacaccgaagggaatgcggtacgcccactgattcgtgtgctcgacaagacccttcagcacgcccgacgcgatgagctgtccgatgacccagcacagattgacgtaggtggttaggtaggcgcgcagtgcgacggggcatacctctgacgcgtatgtgactgtcagggtctggtagacgcctagggggatacccatgaggaactcgccggcgacgagggtctggacgtttggcgcgaagaagaggatgaagatgaagccgacggttgtggcgagacaggtcattagggttttgcggtagccgtagcgttcggagacgatgccgtttacgaagaggccgatgatttggccgacgctcattgcgttggttaggcctgcttgccatgaggcggcgagaccgtatttgccgtcggactgtagttcgccgtatttcatgttgaaggctgggaagccgaagaatgagccgatcagcaccacgtcgtagccttccatgatgatggcgcaagagaggaggagggaccaggctacggctttggggtagagtcttagggcttccatggcggtcatgttgtgttctttttcgatggcagcgtgggcttctgcggtagtttggaggtctgtatagcccgtcagggcatgacctgccggttcgattgagtcatgtttctcgacatgagcggcagcttgcttttcagaagccattgctaggatggaggtgccaatggaggctctgaggatgattccaggttattgcttatggacagaactagatggaagagaagtattccatgcgggcgtccggtctttaagtacaaaatcggtgcttaacggtcgtcaatagggcataatgagcgaggagtcgagcggggttccattggcccacttgtcaagtctaatccttgcttaattcttttgacaagcgaggcgactggaggaaaactttccccgggtttgtctgtacggggtattggggtgagtccactatccccggattttcatggagtcgtgattggcctgatgtcgggccgcagagttgaagaaacaatttcgccctgcatttcctccgcatgtgcttttctccgtcccgtgtttcgccttgttcgtattggccatcgaaggaccacttcgcctgatgcagttagaggaaactgggggatcgcattggctgattggtgaaattgtcggcccgacattctcctttttcccctcattttctgctcgaacggactaacgaaggtcagttagacccggaaagagagacgaatcggcatggacactcccgcatttcacatggaccggccagttcggtatgctctccggatcgtgcgattcagttgggaaaagtggaaatacgtggaataagtgggatcagtgggaatccccgtcgcactgatacaccactgatacacccccctgttcagcgctagagagacaccccgcagggaaatgtgtgacaccaagatgcatgctggagccgataatgattgtcggcccgacatcaagtcaatgagagcaacggcctccctccgtgatcccggaggctggactccatcgcgtcttggggaggtacctagtgcgattatctaaaatcgaatgctttaggaatatatatagcctccccgctttatccgacgtatgacctatattttctcttctatttccatttcttgcattccaatcccttacattcaccatgtctcctgctatagtgggcgaaaagtggtggaaaaactccatcatctaccaaatctaccccgccagcttcaaagattccaatggcgatggcattggcgacatcccaggcattatctcgtccctcgattacatcacaagtcttggtgtggatgtgatctggctgtgtcccatgtacgacagtccacagattgacatgggctacgatgtggccgactaccaaagcgtgtatggcccatacggtactgtcgaggatatggagacactcattgatgcatgccacaagcgaggactccggattatcctggacttggtggtgaaccatacctcagatcagcacaaatggttcaaggagtcccgctcctcaaagacaaaccccaaacgcgactggtacatctggaagccagccaaatacgacgccaatgggaatcgtcagccgccaaataactggcgcagcattttcggaggcagtgcgtgggagtgggacgagacaacacaagaatattatctccatctgttctgtgttgaacagcccgatgtcaattgggagaatgccgagactcgccaggccgtctacgacgaggcgatggaattctggctgcggaagggtgtggatggcttccgcgtcgataccgtcaacatgtacagcaagcaccccgagtatcccaatgctccaatcatgaatccaaagtccgagacacaaccggcgttctcgctgttctgcaacggccctcgcatgcacgagtacctgcgcgagatgaacgacgtgctttccaaatacgacgcaatgactgtgggcgaactgccaaacacccataccgtggagggtgttctgcgctacgtctcagcagccgagaagcagctgagcatggtcttccaattcgacctcgtggaacttggccacggcaaagactataagttcctgaccgacttgcggggctggaatctacgagaactgaaaactgccgtaaagagcacccaagatatcttgaaggggaccgatggctggaccacggtgttcatggaaaaccacgaccaaggccgctctgtgagtcggttcggctctgacaagacacccgagttgagggttcggtctgcaaagatgcttgccatgatgcaaagcacactttccggcacgcagtttatctaccagggccaggagattggaatggtgaatgcgccccgggaatggacgattgacgaatacaaagacatcgatagcaccaactactatcgaatggcaagcaaaatatctggcgacgacccagccaagttgagcatagcgatggattccctgcagcatttggcgagagatcattccaggctgccgatgcagtggagtgatgatgcctatgctggcttctcaccggcctcatcggcaaagccgtggatgcgcccgaatgacaattaccccgagatcaatgtgaagctccaggagaaagactcgtcttctgttctgtccttctggaaacagatgaatcagctgcgcaaggagtatgccgatctcctggtctttggcgagtttgagatcatcgacgagccgaatcagaatgtctttacctataccaagacaaatcacaaccagaccattctggtggttctcaacttctcggagacaacacagaagtttgagaaaccagattcggtgaagagtcaggattggaaattgctggctagcaatgtagatggacaggaggacttacaggcgtttgagggaagagtgtttctggtttagggctggggtatatactactagatagctcgcaattggttagaggtcatatggcagattgcaattgaatacctttcaatgatttgattcagatctgtcagatctttccaatcttctatgcactatgacatacccggtctgttcccagtttcaccccggatcaccccggattcccagtcttccagtttattaactaagcttttaattaatgcacatgagtacaaatcaggcctatttaggtaagtctcactcgttccctttttccgatatcaaccaacctcagacctacgcacggagaaccccgtgacgctacgctcaaaaggtccaaaatgccaaggcccttttcaacaacgcggggaagagaagtacatgtttcgactagacatcagcccctgaacatttgaaactcttcaagttaaaaagaagagaaatggctagtgcacatacccagccgcgagtcccaaaagcatgcgacccatgtaatcgccgcaaagtccgctgcaacggccagcaaagatgtcagcaatgcgagcacctggatctcctctgcacctacacagagaaccgcttattgcgatcaaggaaaaacgtacggcgaggaaccgtcatctcaaaatacaagagcgccgacaccagacacaccactctgacaccacttctctccccacccgcacctccagcgtcaccccaactaccaacctcgtactatgaaagtctactcccagcctacatgtcctatgtataccccttcagcccaataatcactgagagcgaagtgcgcacctcaatcagcaaaatggacacagaaagagagcacgcagccttcatctacgccttcaccgcagtaaccctggacctaacgcgctcatcccaaaccaccaaatcaacgccccaatcagccccagcccaaataaccgaattaatgcgccagtccgtggaaacccaacaaccactagtaataggcttccgaccctccatcctgcgcgcaacaacaagcatcttcatccagatgtgcgccatgagtctgggccactacgacctgggcttcttccacctccgcgaggcaatcagcatgatccagatgcttcgcataggcgataaaaccgtcaacgcaggtctcagtacagcggaacgagcccggcgccaacgactctactggcaatgtttcatccacgagcgattcatgtccattgtgaacttctcgccggtgaccctgcccccacactcgcagtacccggaagaagataccttcgtgggcgcggatatccaacagggctggacgcaggtgattaagacgttctgcatgcttgatgcgtcgtttattggtctgtggattggggaccggacgcaggtgactgcgtcgtgggttgagcgcaaacaccgtgagttggatgatgagttgtgggaggtggaggtttcggctttgtcggagctgcagcaggcggatttggttattacgaggcagtggatgcggacgttgttgtggcagatggcgatgtcgaattgtttgcttagttcgcatgcgtcgtgtccttcgctggaactggggatgccgttgagattgtcgagtcagctcaggcagtttttgaccaagatctcggagaatacgattcaggtgcatggatcctcgatgattagcaagttgttggagattgttaatactattgctgatgtggtgattcatgtgccgcaggcgactagggaggagacgacgagtcgcattgatgatattgtttttatgcagggggtggtgcttccgtttaataatttgcaggtgatgtcgaaggatattctgttggataagtttcgtttgattagggggaggtttccgcatattgaggtggctatgcaattggccgtttagttggagatcggagatatcccatgaagaggccaggagaaagacagagcgactactaatgtgagatggagcatgttcagattgccttccatccaactgaacatataacttgaaaccagcgttgacacttaacctaagcataattcaatgaaatatcgatatcaatattacacaacaattcattcctctagacccgtttacaacgcagacgtcacgttggagaactcacccttctggagcttcgtgtcccagaagatagggttcatgtcatcgaatccgtggtgcacccatccctcttccttgacatggtacaggttaatgaaaccaccggagtaggcatcacggtgcatggcagccagaatggcccggcggccgagattcaatgcctcctcctcagtcagctcgtatttgtactcggcgtccagcacaccataagcaaaagtctgaccggatccaacacagaacaggttaccgggaaggcgagtgccgtcggagtcgatgtagtacagtgcgggtccttcttggggcgtcatctagggaccattgtcagtttccaagtcccatggctgtaaaagaaatatatggcacatactcctgctaacatagttcccatgctaagtccgtatcccttgtaggcgtaagttaggttggcaagaatcttggacgcagcggcgacagtgatacggcgcttgtgtcggatttctagacagaagttcatcagcaatgtccttccactccctgcgaatatcaaaactcgagctgacttaccgtgcagagtgcactgctgactcaaataccgcaaccaatattggcaatcctggcaattggcaacaaccatcagcaaccaaggtccatcacaccatcactcatcatcatcacttgcggtcgaaacttacagctgcaccaccggccatcgttcccagaagacctggcgtcggctcgttcgtcttcttgtcctcaccccgactcaaccgcgatacaggaatgaccttcttgactgtctgactggcaatccagttgccggctgttgctcgcgaatcggtacacacgatctaccccattatgtcaatcagcatacatttcccacaatcaaggaaaccatggtataagcgaaacgtaggaaaacgtacgataccgccctggaaccggaaggccagggttgttgtgccgtgagcgagcttgataggacagctgggattggagtggtcatcggtcatggcacgcaggaaagcagagcgctaggaaataatcattgtcagtccattatttcgtttgtctcaagcttagataggttctggctagcgattctcttgggcatagctgtgatgaacggcgcagcttgggttgacgtcaggatagacgtatatcccccgaccataccgccatcgagatcaaagagaatatgcagcagtatccatcgtaaactcacgttgtcgacaggagggaggctgaacttcagcgagagtggagggacgctcgcagtgaggtcctgctgctcttgctctgagtacatctcattctgatggggagggcgcgagtattgggcgacaagcttatccattgtgtactgaagtaagagaaaataaggaggaaattagaaaaaagatgctggaaggacgtgaaagggattctggtgagacgggcgagtgatggttgaagctccgctggagctcggggtttccgcgtcactctggcgcctgcggtcacgtggatgctctacagtacatacaaatcgcgatattgatatgaattgattttggaagaaattcgacgaaagagaaaaagaaaagacgaatcaatgaattaacgaattaacaaactagcgaattaaactttagaatacacaatttgattatttcctgagtataaaaccccccatgttcagtgccaacgcctttcccaggagcaacgtttggtgcccaatccgaggagaagaaccgaatttacacataacagccgaagtatgtccgaatcgaactaaaaggagaccactggaccactgcgaaggattgaaccgatcacgcaagcgaaggctcaaccaccatcttcgcgggcagggcaccgcttcccaccggttcagtgtaaccctcatgaggattcacagaggcattctcgaggacttccgactggcgctccgacacatcgtcgtgtccattaacaccggcaccgttgacatgaactggagactcttggcccgcagcggaggtgataggctcaacgctgggttgccattcacggagatcattctcggcatcctcaaggacctggcgtgccaagggctcattgtcatacgcctggcgagcatcaccaggaacaacaggggagtcatcgatgtagttgagcaggcgacgagcatggcgagccaggatggtctgcttctcggcacgctcaatgacggccgccaggtggatatcataggcttccttgagcttttgccgggtctacaaatgatatgaacgttagccagtccaaactaacctcacacaccatacaagaacagattgaagtcagaatgaaacatacggtattagacagctgcgcctcagcaaccaagttctgagcctcagcccgaacaagctcatgctccagtgtgaccagacgcgggctggaaggatccttgtacttgagcttggcaatctcgtcagtgaccttctggcgctggtcacgagacggctgaacggaggcctccatgttgcgaatctgcttcaggatgccacggtagtcctcaaggttctgggcaaagttgtcttcctgttcgcctatctcggcgagcatgacgccgagcttgtcggaaatgtcggagacattgtcgtcttcagtcgcctctccccattcagacagctgggcggcgatcgaggtgcgctcacggccggcagcttcatgggcaccgatggcggagttctcgcttttgatcagcttggtcatcttgcggctgagctccggcgcttgcatcccacggagggtggagatgccgaaccgctgccgagggggctctttgcgcgatcggaatgataggttgcggttcctaagctttggtttagtcaaagtgggagctgaggatacaggaatacgtacatcttgttttcttgtatgaagatatagtcaatcaatacaagttagggttattggggatatgggttgagagagaaaagaaagaatctgggggaggtcaaatgataaagtcggtagcgccttcctatagatgacgatggtgacgaaccctattcttctccagggcttctctttttgggcttcagaggaagtgtagtcccgactctgacgtcatgaacggagaggggcggaattggagtcgagcagttcatcaggtgcccaggtgaacatcacattttccgattgcagacatttcaagcttattgttgtaaaatagtagtgagtggtgatggtcttatagagtctgagttgcgcatggaagtatctacggctgatcgtcattctccaccggcttcccgatatcagaatattattcaattatgatattatacttctcatatttctcatatttcatacatttcatacatatgtaggtatataatcatacagggatttatgtgtcctttatttcctgattctgaaaatgcatctcaactgttaccttcctaattgggacatatcttactccatcaagccgacactacacaaaaataaggtgaaaaatagggttaaattcatgagagatcccaccctctatcctctcaattcgaggcaatcaaacaagaaattcgcagggaggaagcagaaaatccccggccaatcttatggtacacaaccagctaaagcttcctgcatgaatccagacacccaaacaagccccgcaacgcctggaacagaccagaataactgatccgcagaatcattcgttaaaaaaaaagaaaagaaaacactttaaaagatcccagggcagattaggaaatgtcgtcggtatcggggttgtgcgagtgttcgttgtcagatgcatggaatgcgtcaccaaacgccgagttttccaggtctggcaagtcaagcccatcgttctgctcactatacgccgccaaggcatccccagcactatcgatgttggtgaagtcgaagtcaccaccgaccgcggtatggtctttgctctcattgtttaccatcacccagtcgttggcctggccattggtaccagcgtggagctggtcccccaaatccatgtcaacgtcagcggacatggcagcgccgtgaattggttgtccattgacggaaacacttgagactccgcctacatcaacgcccgggctgccaaactggttgagtaggtgggagtcatcgtccatgaccatatcgtgggtaaatgagtcaggctcatccctgtgttccggctcaatcttctccagcagaccgcccttctcgacacaggataccttgggctcggcaacgatttgcttattccaggcagtctcaacttcccggactacctcgtcgaccctgtacttggctttatcttcaatataatccaattgcggggtttcgtcctctgttggaatgaccactcggccctccagtctccaaatctctgggcccttttcggttgggtcagcagcagactctcggaggcgcaactcggcatccttgagcaatgaggttcggttgaaacgttgcatccggcgagcatgctgtttcttcagattttcgatctcggcagtcatgtccgccacctttttagaaacccgctcggcaaactcctctgccttagccggctccatcttgttagcctgtggggcgtcgcccgcctcctgaccttctccgccagaggttccaacaggggcatcaaagaagcctgcggtcagggactcgagctctccctttcggcccagacccaaagaaaccggcgtgatttgcgagatactgtatggcgacgcgaagatttcctccatccactcgtgatgctgctggtatcgcatcttgctgacatcgcggggggtcaacagatccatagcatcaccactggacacatcctcgtcttcaatagcaaaatcggctgttgcagaagtgagggcagcagacggcgcacggtgtccgcgcggccctttggcgacaggtgcattgggcggaactgcacctgggtgtcccgggggtgcgtagaaaccaggcccacgaggcgcagctgccgggtaagcaccgggttgcccaaagttctgcggagccatcggcggaaaattgataactggccagctgttacgatcatgaagcaaaaagtccttgcgggccaattgtccttggctctgaaggaagcggcgctggctcatcatgccctggacttggggtgtaacttgaattcggtttgcaggggcatgatcctgaggtgccgcacgggtgtagtgcacaatccacagtgatgggtcgggctggggagcattcggtactttagatgaagtaatgcggtagcgcttgcggcagtgtgttgccacgggctcattgggagggtggaaaccacttcggtgaaggtacatctcgacggtctgtgtcctcaaatattagaatggaatctatatggagcaaggaaagcttcatatcgcaggatgcatacatagccgcgagattcaaaggtaaaggcctgttcctggtcggcccagatatacccgtcgctagcaaaattattgcctagatggttctgaggctgccatgtaagcatgacagtcccatctgggggaccatcgaggaatgtccaatgcattggctgggattgacagatccggggtgcgctcgtcaaatactccacggcagtctcggagggcatcatatgcatgctggggtatcggttgcgtgaaaccaggtgcatgtggggaagctatcataattgcgacaagattagtgggggtgtcacagatcatggggcaatcaatagaggaagttgttggggtcttaccagctgccccgggatgcgtgtggccgggtcatccatactgggcgcttgattgccaagtgcaatcaaatttgggaagatacaagtaaattaggttcaaatcaagtgaagcaattgggatgcgatggaggtagacaggtcaagagcaatgaaggatggaggtgttcaatgaacgcgacactacgcgggagatttttgatacggtggatggtacagacctgagatgcagaacacctgaatttgcaggcatcagtgtattcatagtcaaccaactagttataactatttcctcggttgaaaatgttcatctattcatgcaaatttgtatgaataggcagtggttaatgaataattgattgtactcttgtttatataggaaattccgaagaacggatgctagcagataggaaaaggggtactctattttgtacgcatttaggacaaactagcattttcctgcagaatatcttttttttccctattaaataggcaaataggtattcctccttacgctagtcaagatcaataaagggaacactctcatccccttgaaaggaagatgaagtacatactcccccaacctcgggccttttcagctctccacctaagcttttgccaattcctccgcattctcttttgtctccaattctccactcaaatccccttcgtctgtcccagtgaccaatagacacatcaatagtctctgcagatcaaccaatcactacaaaacctgaactgagctggccattatttcctgtactatgtagcacgtctctgccgatcctggcttgttttccctttcgccgaataagtatgactccgaggcccggagatctgtccggtcttttctcccttctctccatcgccttcagatcactatcccattatcgactgtgacgccttcgatttaccatgggttactcagaaaggcagcagcagccggaggatgtgatccaaacagccccggatgaagatattgagaaaaataccgtacccgctcacgaggagaaaccgccgactgcaatattgccggctattgaccctgagttagagcgtcgagtagtaaggaaattggactggcgtgttccaacattattgggatttttctgtatgcttcgcactgcagacattaaacgaacttatactctaaccatgtgtgtctgtggtatccagatctcctcgctttcctcgatcgaagtaacatcgggttcgtctgcaataccatctttggacctgcaagtgaaatagcacaaccgctgacaatgtaaaccatagcaatgccaaaatcgccggcatggaagaggacctcggcctcagtggaaaaagctacgcctggctcttgacaatcttctatatttcatataccgtgtttgagtttcaagcgctgatgtggaagattgtcaaaccgcaccagtgggctgccttcgtggtattctcctggtatgaatcccacatgcaatgctgtcactcggctggaattgcaattgcaaatctatgaatcatggactaacgaacgatgataaggggtttgatggcgacttgccaagcagcggtcagtaattggcaaggtatgatggcgctccggttcctgatgggcgtcttcgaggccggcttcggtcccggtgtgccctatctgctgtcattcttctaccgccgccacgagctgggtctccgatgcggtctgtttctgtctgccgcgccgctggcaaatacattcgccggcgccttggcctatggtattacctcggggcatgctgcgttggcgaattggcgattactgttcctggttgagggtgttccggtctgcgcggcggccttgctggcttggttctacgtgccagatagcccgctggacgctaagttcctgactgaggaagagaaggatgttgcgcgtgcgcgtgccctgcaacaatccggggagtctgatcgcaatggcaagatccaatggaaggaattagccatgacgcttctcgatgtgaaagcgtggattacagcagtaagtggaacatcagcatcattgtgtgtgttttacggacaatttgctgacggtaacccgtgtacctagttgatgtacttcagctgtaacgtcagtttttcttctctccccgtgttcctacccaccattctcagggagatgggcttcacagccatcaacgcccaggggctcactgcacctccattcttcgcctcatttctggcgacaatcgtgaccacctgggtagcggatcgaattcaacagcgtggattgatgatcgcaggtttatcactggttggtggcgtggggtacatcctttgcgcgacttgcacatcagtgggtatccgatattttggtgtgttcttggcggcctgtgggatcttcccctcgatcgccaatattctgccgtgggttctgagtgagtcatttccttttcggattagagtttcctttttttttttttttttttttttgtaaaggtcttttactgactggacgtgttacgttgctcattgtacagacaaccagggctccgatacacgccgtggtggaggtattatcctgctgaacctgatcggtcagtgtgggcctttcctgggtaccaatatcttcccagatgaacaagcccccaggtatgtaaagggcatggcaatctgtgccgcttttatgttctttactaccctccttgctctgtgtctgcgtgtgctcctggtatgggagaaccgacgtctggacaagaagtatgggcctcgcattgaagacccgaaagctgtggatggcccggtagcggaggataattacggtgccaattaccgttatgtactgtgatttttgaatccttcagagatcactgcacattcttgtctgctttgcgttctcatatatatccatggatgccctgtgacgactatgatgactatgatgtcagaaagcccaagctcttcgaacgaatattgaaatctgtatatagactatattttctgtcgaatttacagatgtacacgcgactccaggtggatctcatttccgataatgactgttcccattctgtgatcctggtactttggcccccacgtacatatatagtaggtagccagacatcgatgtactacacccaaatctgtagcctaaacggcggtggtcctatagtataagagttatatgttatattccctattcaagaaatctacaatgtacaacatagttacctttcctcgcgggacctactccgtggggcaaagtaacaagcccggggcggaacactccgggccagtcatgaagccaaaggccagaagagctagaaaagccagaaaagctagaaacgtcacttgagagcatttcattcgtgcaacgtacaacatagctcaccgaggagtccaccggaaaaccggatagagtcggagaatatgacatctcgagtgggatggcggggtatgactgcataaaaggttggccctttctcctttccattcttcttctcttctcttcatatcattccactgaatcttcattacaacagtaactatctaccatttatgtatacttgtatatccgcagggctgactctcgtttagatcccaaacggacaagtacatactgcccttcctttgggagccatggatactctttggctgggcacattatcccttagggatcaaggtatctcaggtaacttctgggtgatgagccggtgttcgttcttgcgtcggtggtgaatccaatgtctctctcggacatcagattcatcctcggcgtgggttcgttctgagattatacggcctttaacttgatctggataataccagcgaaaggatcatgccctcccctccccttcccccccaacttgagtagtcaaactaaccaaggctcaaagtcaaatcttcgacttgatctctgaaccattatgtctcctcccgctgccatgtttgagtctgctactgttgcccctaccggcatcaagggcaaggtcatcgtccccgagtcggtgactactaccctaaccggccagggccagtcaaagctccttgaacagttcggcaacaaatgggatgagttcaagttcgcccctatccgcgagagccaagtctcgcgcgccatgacccgacgctacttccaggatctggacaactacgccgagagcgatgttgtcatcgtcggcgctggttcctgtggtctgagtactgcctacgtgctcgccaaggcccgtccagacttgaagattgccatcgtggaggcctctgtgtcgcccggttagtcttgtccctatgggagcagactctctcgtagtccacccaaaccaacacagcgtcactaacaaacacataggcggcggtgcctggctgggtggtcagctattcagtgccatggtcctccgacgtcccgcagacgccttcctgaccgagctcggcgtgcccttcgaagaagagccgtcgaaccccaacttcgtggtcgtcaagcacgcctcgctgttcacgtcgacgctcctgtcaaaggttctcaccttcccgaacgtcaagctcttcaacgcgacctgcgtcgaagacctgatcacccgtccagacggcaacgatgtccgcctcgccggtgtcgtcgtcaactggaccctcgtcaccctccaccacgacgaccactcctgcatggaccccaacaccatcaacgccccggttatcgtcagcactactggccatgacggcccattcggcgctttctgtgctaagcgtctcgtctccatgaacgctattgagaagctgggcggtatgcgtggccttgacatgaatgcggctgaggacgctattgttaagaacacccgtgaggtcgctaagggtcttatcatcggtggtatggagctatcggagatcgatggcttcaaccgtatgggccctacttttggcgctatggttatgagtggtgttaaggccgctgaggagactctgcgtgtcttcgagacccgtaagcgcgagtgtgctgagtaaattcgcactctcttgtgctggctcgctctgtcgtttctgcctgcttcttgatactggtggacggtggaggtttatgtagctttgatgatgacgatttcttaacaaatgcacttcacgctcattttgtgcaaatcctcttccatttggacctgtagacaagtattttatctcgagaagttgatcttgctttcgaattatgaattagttttgccagtcgaggataagactagccgggcatgttatactacacttttgtaaccaatataaaacatacagataagccacgccattaagccacgccatcaagccgcatctcccatgtatcatgctctttccacaaatcagctcgtgaaaaggaaaacaatcaatcattgctccgatcactctgcttctttcggaacggtacctttaccactttccgcggcaaccaccaagctcctagcatttctcacctcccactcaaactccttcaaggcccgcaattcaccagacatgaacagtccgccaatcaaaccatccaaaatcccagcgccgaagttgagcgtgctgaccaggacgaggatgaatccgatgtacgtgcggctgccaacccaccagacgccgaccatgcaaccaatagaaaccacaatagacaccaggaaatgcgccaggcgccaacggcgctgagagcgttcacggtcaacgtatttgtgaatgacctgaacgatgtcgtcatatgtgtctggggaaagagaagcattgggggagacgggctttgagcttgttttatgcagggagggagaattgggagaagctggagcagagtctgtggagtgggagggagggtatgtcggtaccgaagaacgggtgatgacagcctcaacggcgaagtggtcgctcagcgagcagagaagagtgggatggcgctgtgtcatggatatctgaactgactggacagaccaggtagatggcgggaatgcaggcggatagccaccgtcaccgatgaagatataatccagacgtttgccgcgcgggtcaggcgtgtccttgtcaacgacaatatcctcacccttatctaagcgtttacgcatcgcctcagtccagcgccaggtattgaatgacccatcgcacgtagctccattctcggtgagattgaactcagcggtgggaatcggccgattccgtgctttttcaacaggatcaatggcagccgcaagagacgagtctgggtgcagctcccgccaggcatcgcgaacagggctctgcgcggtgataagacggtgcgcaaaagaggaaggcagcatgttaaagtcgcccaatccgatgactaggtgcccgcgttccgcggcgccacgcatgagcttggagatctcccatgcctgtgcggtccggtggcagagataagagtcgttcggttcgcgctcatacggcgcgtgcaggtgggtgcagaacacctcggcgacgtcagcggtaccaggaccgaaccgaacgcgcgcgcaggccactcctttccccacgaaccaatctcctcggaagaatgccgttggtcggccattcaacgggtatccgaacatgctgctttcttcgatcggccattttgacagaatcgccaatcccgcgccaaatatgcccccgtaatagaatttcccgtacggcaggatgtgtcgagtctgatcgcgaatgctttcataatccttctgggtccaacattcttgcaaaccgactatctctggcggcgggctggctactgccaattgccgcccaatctctgacatgcgttcatggcggtacttagcgatgtatttgagaccccagcagttgaacgtgagaatgcggatgtcactcggagctttggaggggatagggcagaccatttggcccgatattgactggaatgagctttcacagctatttcaagtttattaaacggacagaaagtgctcgataatgtgctaaaacaaccctgaaagatattgttccgcctgatggtctacgagttcacgtggtttaatatgacgcagctgagaagcctgcctccagactcaccgcctttatattgtgcttcgcgacgcgtctgacattttcgggttctacattgacttgttgaccttatttcggcgcattcgtgtttatttgttttggatgctcttgcgcatcctattccaaaatggaccgcgccaatccccagcctcgccgccgggaccctcgcgcccaatctccggccgagtcttcctccgacgaactcgctgccggctccgaccatgatgaagcggcacgccgccgagccagctggactctgcaaaagggcatcaccccactgcgcccgcagaagaccggacgtctgtacagcgagtccgagagccctgatgagctagctgtggatgccgacgagtactggcgttcttcacgcaagcacaaccagcgccggtccccttctccgatcgcccgccctagcatccgtgacgacctctctcagggcgagtcggatgatcttgccagagatgatgtgactggctcagacgacaaccaggagagcgacgccgacaactggtctgaccgttctgccacgcctattgctcctccgccgcctcctccgcctccgctgcctcccaagccagagcatctgaactacaaggagaagtttgtgatgcacggccacgtgcgcggagtgtcggctgtgcaattctcgcccgattgctctatgattgctagtgcaggtatgtattatactcatgttctagttactacacggcttgataactgactttgcgcaacaggcgccgatgcagctgtcagggtctgggacactgcgagtggtagactcatccatatctttgaaggtcatctagctggtatctctactcttgcctgggcccctagcggtgactggattgcaactggttccgacgacaaaacgattcgtttctggaacgtgaacaccgtaagaaaacccatctaccattttatgttccagcgcctcttactaatgttttgatacagctcaaggcccacaccaaggtctttgatggccatcataactacgtgtatcaaatcgcattcgcaccaaagggtaacatccttgtcagcggttcctatgacgaggctgtgttcatgtgggatgttcgccgagcacaagtcatgcgctctctgccagcgcactccgaccctgttgccggtattgatgttgggttggacggaacccttatcgcgtcgtgtgctctggacggacttattcgtatctgggacacccacagtggccagtgtctccgcaccctggttatggaagataacccgcctgcaacctgcgtcaagttctcccccaacggcagatacgtcttggcctggaccctggatggctgtatccggatgtgggattacgtcaagagccgcgtcattaagacattccaaggtcatgtcaacaataagtacagcttgtcgggatgcttcggtagatatgggccccagggtgtgacctacaagccgcccttgtgcttcgccgtcagcggcagtgaggatgggtctattatcttctgggatattgtgagcaaacaaatcttgcagcgccttacaggtcactcaaacgctgtcctttgtgttcacacgggtacactggaaggcaagcgtctggttgtgagctgtggagcggacaagactgttcgtctgtgggaggaggtgaatgaaaatgacggaggacctgacgacgataacttcagcgacaccacccctacacctgagtctcactcgcaaaagagcacccctgcgcatgatgcacatggtgatgatgatatgactgatgtctctgctgtgcattccattgctgctaccccggcggaagatgtgactatgacatgatctttgtcatttatctaacgatttttctttctttctgggtgggcgagtcttttcgagaaaaggaaaataccccggcgtctggagttgttcacatatggacaatctgtttttccctgctgttttcacagcttgggctttcattatggccgatgatacgtcatctgcttgatacatgtacttgcattgcattccaacatgtgacatatcgagcgaatgtaattatctagaggctgataattcaatttttcactcttcacatttgagtagcagagcttagttcgtctttggatcggtaaaagtggcatcttctgggtcgccttactgttcttacgccaacatggatccattttctttgttgatagaaggcgggagccacctatatgacttggcgggcattggaaaacgatgatatccctatcgaaagggaatgtcagctctatatgaatgcagcaaaggctgcaaggaatatattgacgcagtgctgcattgccactatcttccccccccccccccaacctagtgagtgtctagtaactatctagtcaggtctatctgagagtagatgcagtgaatcacagctcacttctgactgtttctggaagtgtgatatatggatccgttcaacgtgacgacagctttgttatttgagaaggatctagcaatattcatgtggcagagtatctacctcaaatggctacgacctacccagatcttcagtctcatcacatagtatattcattttcatcttagggtcataaatgggtttattgtgctagcatgttgcctgcaacttcccacactatgttgtatatacctgacactaatcgcatgatacaaacaagctgtccgaaaacaatgacctgacagatgcccgggaccaataattgctgcaggtcactagatacagtcaatgaacagtattgtgaatatttctactataatgcacattggaaccaattgtccgccatgtgacatggaggccataaaatagtttgtacaaaactaatactgcaatggagtttcactccaatgccctatatatccatatagtttatatttgtcatgacatgcagaataaatctggttggatgattgaacatacagccccaaatgaacgctcaacgccgaaaatcgaagggtatctctttcaacaagccatctaattgcggacgacttgactcgctgtagcagatgcgagatcttccgactcgctgggtgccagaccagacccaaaattaccagcccagccagcgggaggtgtgccatatgactgaacagaccgagccccatcaacttgcttggtatctgttttcccagccaaggaagaccgagcaggagtctgtgtcttcctcagcccgtcatcattcaaaaaccgacgaagtgactccttgccaactttattatcaaccaccaccagtagttcatcgtatgtaatttgaggattcgcatggaaagcttcccggattcgggctcgatcctcgtccttcagcttcgacggtcggccagagcgggctagtgagtgattattgactcggttgctttctcggagaatggtggatttgatggttgagagggggatatgcgggtattcatcatggatttgtttgtaggtccatttggcggtggttctgagcacacagagccgggtgcgaatgaatggatcgagttcggccccacgtcgacgagatcttttctcggttttttctggggtctccggcttctcgagcccctcgggccccatggtagcgagcttgtgcctggagagggacgtgatgaggggtgaaatgggtgtctttggttgtcagccacgatgtagtaggcggtatggatattacattttctgccgtgtgctctaataggaaggtacgaagtatatacctttcatttttgtattcattcaggtgttcgccttgtacaagtaacaggtaggtgagttgcttgtagtataatcgattatgcttgacatagtgtttattctgtggtttgcgaccattattgattattccaacatctagtgatagtaggaaacaagacattaaaaaggatacatatattgttgcattatgaacataattttctcgccagccaggattatcttgagcttggatatcaaaataattagaatccaatgctgtgcccaggtgaaggacagaagccgtactccgtataaacggcagactattttttacaacatttggataattggggggtttagagaaaaaaaggtatctacaatatgtgatttacctggaccttaactctagacctcgtattttaactcttgagtgggaaatcttttatgttgttttcattaatactccgtagattatctattctttggtgggacttttcctgaagacgggatcagtcccctattttggagttgctccattatttaagatcatccaaggaagggtttgttcattttggtgacaatcaacctgaaaccatgaaacatatatatttgcaaggcttttctacagattgctcggtgactgccctctaacaacaagctagttcgtacagaagacggatctcgggagtatactctacagattatgtatggacaactagcaagcatggtggaaggccccgggctaccagaggctgtcagtgataatcacaacaataattgctggtgtccatacggagtacaacataggctgtcaaaggcgataagaatagatcttggtgatttagggtggcactctagcgcttggccctgtctcacattgatgatcggaccatagagtgaacccacataggtctcaaatttaattgtttttacacgctcatagtttccaagatgtatgtgcagtacgcaaatgtgattcctacaacatacaacattagttctggactcgattgattacatgcattataacaagatttccaagaacattatgtgtccatctagaagcctgtaaggggtccactggcaagtctagaactgggattgtgtgaggatcttcgatcggcgctccaatcctaagccctgtagctttctcccatccttgtgtatgcgacgcctgccccgcgaggggcacacgtcatacataagatgtatctgagcactgtgatgggcatgtctgattcgtgaagaagtggatgatggatacagaacattcaagtttcggttctgcaggtaccgctatccccgaatactgtaccgccgtaccttgcgccgacgtaataatgtatgaattaatttgaatggtcgaatcataattcgtaaacacgagaggcaattgacatcccgtgttgctgtggctggtgtggcgtttggaaaccccttggaggaatgtgtgttccatgggtgggcgaccgggagaatttttagcgcccactcctttgggtcatcttaggcaggaaccttggtaacttgagtggttaaccttgggttgaaatggtctggtgggaaccttggaagctttaaatatgagcttcaactgcttatgtatgtacggagtacattgactcctttcctaattgacgcgattagatcatattttgggaaataatacgagagaagaaaaataaaagatataaataccaagcctaatggaaatagtaacataccgagcgttaggtctagactgaaacggggggccaatcagtcccaaattcagggggccaagtttttagactaatcgtgtagtaattctacgatccagccctgggagacttctcttttcctcttccacagatcatcgcattgtgagagggggaatctcattcactaattcccagccgcttcctctctcctactactctcgttcactgcctgtcgctcaattatttacagcacttggttgctcgaagaaccagtgtctcacaatcccactacgtccttgcgaccgttcgactcatttattattatttatctttttatttctttcctctagcgggttgatcctgcttttccatttgacttttaccccctgtgcacttacccacagtcgctccatatatcgttaccacccgtccgatcatcgcgcgagtcgatccctacatccttgatgaatacgcgcctccttggttcaaactgttagattgagattggtataacatattgaacatcaattgtgcctggccaacatgcagaacttcatctgggctctgctaggcctggccatcgtgcctcaagccctggcagccgacaccctatccacgagcggattcaatctgtgcatgaccgactcggcaatcaatgtccaaaagatggatgtcacctacactcgttctactggagtagttgtcttcgacgtggctggtaccaacgcgatgaaacagaatgtgtcggcggctatcaccgtcactgcctatggcaacgaactctaccgcaaagaatttgatccctgcggcaacgacatccatgttgaagaactttgccccgtccccaagggcactttcaaggcgagcggatccatggaggttccggccgaatatgctagccagatccctggtatcgcattcaacatgcccgacttggatggtcaggcaaagcttatccttaaatccaaggaaggaagccacagtaacgtggcgtgcatcgaatctcaattatccaacggccacaccaccaacgtcggcgcggtcaaatatgtctcggcaggcattgcggcaggcgctctagcactgagcggtgtttctgccgtcggctcggcaggagctgctggatcaacgacatccagccctggatttggcgatgtaatgggctggttccattccatggccaccaatggcatgctcagtgtcgcctacccccaggtctatcgcagcttctcctcgaatttcatgtggagtactggtatgatcccctggcctggtctgctgcagtccatcgacaactttcgggcggccacgggtggtaacttgaccacggaaagctatgagtacctgaagaatcaatctatgacgcatagtagctcatcgtccaccaacacaacgaaacggagctgggattacaccctcgaattcggccagatggtccgtcgctcggttgaagcctccgccgatgatagtgtttcggaatcggacagctcttcggacagtgacgaatcatcgagcacggtcagcgacctgaagcaagtcgctcaagatctgatggttccttctgccgatgttttcatgactgttctcgtgatcttcgccatcgttattgctgtggttgtcgtcggtattcttttaatgaaggtcgtcctggaagtgtgggcgctgtatggcaacttccctgacaagctgtccgacttccggaaggattattggggcttgatggcacggacaatcaccaacatgatccttgtgctttacagtatctgggtgctatactgtgtctaccaactacgaaagggtgattcctgggcagcaaagctgctggctgcgataaccctctctctcttcacagcgctacttcttttctttgcgattcgcatcgtctacatggctcgcaaatacaagaaggccgagggagataccgacagcctgtacgaggataaggaaacatggagaaagtacagtctgttctacgacaactacaagaaggacttctggtggctcttcattcccgtcattatatatgcattggtcaagggttgcatcatcgccggcggccagggccacggtctgttccaaagcgccggacagctcgcctgcgaaatccttctgttgggactcttggtgtggagccgcccatatgccaccaaggcatcgatgggaatcaacatcgccgtccaggtcgtccgtgttctgtccattgcgtgcgtcctggtcttcgtcgaagaactcggtctttcccaaacaacaaagaccgtcaccggcattgtcctcattgtcgtgcagtctactctcactgcagtcctcgccattctcattgcagtcaatgcgttcatcacttgctgccgcgagaacccacatgctaaggcgagaagagaagctggtaagtcaaagctaccttgtgatatgcgtcccatcccaacatgtgcatatactaacgatctctttcttaaagaaaaagcaaaccgcgacatcgacgacctcactcctctggacgcccgagactctctcctaatggaccacccacagcgcaaggagtacgccgagatgagcaacttcaacttcaccggcccatacgagtcttatcgagacgagcccaagcgagccggatcacctggcagcaacgaacgcgatggcctagtctacaatgactacggtgtagcgcacggacgcagcacaagtcccgacagccaccgctcgcgaagctccatcgaaggccgtcatcccacagccccgggctacgggatggcatattaaaagaaaagaaacaacaaaaaaacaataaaaaacaaccaacgaaagcgtcacagacttgatatgacgttacacttctttcttctctcgcatctttccaccttccttcctactcgaccttcttagatctgacacgcgcgctgtggcttgggagttacttttttttgacggttttagcgtgcttgaaaatggcgatcttcccgcctttagatgcatcttcttgtgtgatatcacttccattcttttttcatcttgtctctatacatacctcattcattaccatgtttaccatctatccatttatattacagcttgcaattgatgagcatttcttgtatattgattttttaatcttccctgtgtcttattgatacatagtcttgtggccctggaaatgagtatattgcttcaaaagtaccatgcactacatatattcttagaacttggccccaacagcagcccgaggttgaattcgagtattccaccccttcttatcattaagcattggaacataaccccatagtattttgaaccctgtataactgcctcgtaacttatcattcctacatgtagttgagacaggtctacagatagaaacgttggtatatataatggaagcgcgatggataggtagaaagagcaactcaaagcgacgaatcctttacctgaacaatcttgtgaaaacaaattactacctggtaattttgctcttaacatgctgcaagctgggtggttacattgtcagtagggtctcacaaagcacgccaaaagatctatgaactgggttttggatgatgcgcctactggccaatctccccagtcacgtggatcgtgtggccctatctggaagacagcccatgcaattaatttgatcatcacgccataaaaacaaggattctgagatcagatatgcatttatgtctagctagaagtagctttaattccaatccagtaaattaatgtacacataagagccctgcgtggcttggttgaggcctgtcgcgctggttcccacaggcaccaaggaggagccacaacttctgcagctttgtatattgaagttttttccttcgaacaccgaggaccctacgccctacgccctaccctctacgccctacgccctaccgcctacgtgatcatccacaacataactcgaatgagcactatcgacttttgattgtgaggctatctccacaacaaaaagtagtgtatcgccgagcttcaaacgaagattgaagacgggccctcaccgattaccgaacaatttccctcccgcttagcgcggatagcttcaacccaagcttccaacgttgatcctcaaacctcgaccctcgcgaacagaaacacaaaggcaccggacgagataaccttgaagtgaagtcaaagagtatgggaaacgccaatactaaacagctcgccggttgtccacttcgccctggctggaggccacgcaattatcaatccatgaggcccaaaatcgctggcctcaggtaaaaaaaagacttaaaaaacacatgaaagaaacgaaatcgtatctgaaaacgagaagagactagatgcgtcacttgaaatggccataataagcagattagcgctggtaaggatggaaggcacggtgtccacctcggccgccaccacggtagttcgcaccaggcttgccggcgttacggggtccagtgggggcattagcgggcgcagtgctctggggctgagtggttcctgtttgacagaagtgttagttaatgtgaacaaatgaaataagaacggaattgggatgaaagggtcataatatgcaaagactcgtaagaatcacataccactacccgaacttccaatgcgtctcatacctgctggtccggtcgggacgtgaggttgaggaacttcatcgtacatgccctcccacgaagttgggccaccctgctgctggtaaggcgagaaaccgcgagggtccatcgaacggttcatctgctgttgttcatacttctgctgctcgaaggcaatctgctcagtggcgttgtatcccggtccagcctgtcctctggctgcgtttggggttccgttgttgtagttggcagccatagcggcggcgttgggggtggggctggcggaatcgctgcctggaccaccgggggtgttggattggttgggctgcatcatggcggtgttcatcatgttgggcatagcctgctgggagccagggctctgagggccagggctcatagtaccttgctgctgcgcacccatttgctgttgctgttgctggcgcatctgcatctgctgctgctgctgctgcatctgctgcatctgctgcatctgagccatcatggcggggttcatgttcatagcgccacccatgttcataccgggcattcctccctgaccagcagccatctgatgctgcaaaacggtaaagtactgttgcatgcgttgccagtattgggccatcatctgaggagtcatggtactaccctgtccctgctgagcggcttgctgctgacctccgtcgttctggctttggtcgcggtatcctccggcgcggtggcctccgcgttgatcgttgttctcacgcaggttgccacggggctgtgccttcttgacctcaattggcttgccaagaatctcaagaggacgggagagagccttctcaacagcagcatcaccgtcaaaagtaacgaaaccaaatccgcggggacgtccagtgtccttgtccatcataagagtagcatccacaacacggccgaactgcataaagaattgcttaaagtcctgctcggtagcctcctggctaacgccgccaacgaaaatcttcgaagtcttctcctgttcatcgcgaggaatagcacgcttgggatcaatcttcgatattggtcagcaaacagttcatttttccctaattgtcccaactgtgagatagttcttacaatctttccatccagataatgctccttcaccatcacagtattgacagtcttagcgtcacggaaagtcaaaaatccaaagccgcgagagcgtccagtggcgctatccctcattacggtgcactcctgaacctcaccgaattgagaaaagtagtcacggagggactctaaacatcaagatatgttagctagatcacgcgttttccgcgtaacaaagacatatttaccgtctgtagtttcccagttcagaccaccgatgaacatctttctaaccattgagtagtcaccggttagcgaacgttcagagcaaagacgataagcagaatctccaggggaacgatattcaacgagcgacatgacgatgaagaagacaatgtggtagaaaataataatgagggtaggaagtaaatcaatgtgcaaaggtggcggggtattgctattcatgggctattcgagtgcgaaaagctttcgctattctgagcataaccgcccaaaacagggcaggtgctaggtcggtacatgacccttgtaactcgtagtcactgtcaatgtatacttgtatggtcttgagagactttgatgttcatgaccgggatttaacgtcaagcccactggtttacatgggccatgctgaattcatatcctcctctttctgaactgctcaagccggggacaggcgagatgagaagcgtggaggtgcaagtatttcagtcgtaaaaagtgaattgtcactgtctgtctgtctgacccgtgaaaacctttgccttgtctaacacagagtcccaagctagatagctacttctgctctgccctatcaaggtatatcgacaggaaactatatagtatccgctgtactatatatcgtttgtgacaaaggtccgtgggtggcggttgatttgcgcaagaaattgtcttgatcaagggctccaggcgatgtgccctttgagcttctgctggattccgggcagcaaatgctagagtatcccgatatgatccgtagactttggtggacgttggtggttgtgtgaaggcgttcctcgaactgatatgttgattggccgccgagcccgcattttgttttccctccatttcaaggttgaagacgcgagcgccatcaaccaaccggtaaaattttcctcaaatagcccatactccacagcccagagagatcataacccgcagatatgagactccttcctgcacccagaattgtagttgaacccatgaatagcaattggcgtcaccaggcttgtaccagcgaggtaaagccccaaaccagacgaatacatgcaactgggtagagttcgaatgcggagatgtaaagaaatgcaattagtggacttacccgtcttctttgattcctgttccatgagactcggcttcgacaggagggggtgcctgggtagtggcaggggtgccataagcgtttccggagccattgtgataaccagggtcaaactctgaaggctgagcaggttgcgattcatatgtgctgacaggggcaggggcgaaatcctgtcccgcaccctctccagcaggagcaaggttggtcgcgcctacatcagtaggctttggcgcctcagcggctgcagtggtacgattggtagtctcatcggcatcgtaactaaaaattgaagtttgatcagaaatccgttattcagtgtgaagtgaagtagaaaacatacagatcagcgaagagatcatctccatcctctgggtcagccatgataacacagtgagcagtcaataaagcgataagacagctagtcaagggaataagcgtaaccctagtaaatcagagtagaagcaaaacagaactaagaagaagagcgaaaatcttgtgagcgagcgggagaagagaagaagagaagtccaaccgcgggagtccccaagcggagcgcttatgtaatgccgttgtcttcacgactcgggacgaaagctagacattctggatctatacatgcttagaacctacagtattgctttggtttgtcctttatttcgagtttatccctcctaaatatggtctattgatcttctattttgttcctacatggcctggctgcaggatacggcattcatcccatcacagtgccaccccgcacgtgtatcagactcccgcatgagcacaccactttcggaatccctatacaatggcgaacaaaaaagggcagcaggtatgttaatcttcccaaccttaaagctttcttgaatccttctctgctggccattgagctaaccgcatccctaggaaatggtccagcttggttcgtatctttagcctctccttcgcattttaatcgcagctatagcttacatggcctttcttcccattttgcagacaagtcggagtaagtgaaagctttatatgccctcttctacagctgtagaagtacctataaggtctatcgaatgctaacatcttcgaagacgttccgaatcaccattctgggctggccgaagtacgcccctaagccagggatcatcgaagttctatggctcgaatactgttgttggcgcatcgtactcgcatgccaatattgtacagtatgttagcaatgcatcctacagatccagcaattggtcggaaacaatgactgacaagtgtcttttttttggtagacctacctcggccccgaaaacaccgccgaagccatcagcgacaaatactccatcgaacctggctcgcagggcaggaaacctggttgcctcacctccccggcaaccctaccccggcattatgaccgaaggggtcgacgagtggagtcgtgaccccacggaagatgatgatgaagaagaagatgatgacgacgagattgtttatgatgatgacgaagatgaattcggactccctagtcttgctagtatgaggaggaaaaaatccgcgcctcttaaggcccagaatattgatttcagtggtggggcaggcaacccctcaacccttgggtatggattggcagctgccaacaggcaacgcgcgaatagtgcagatatcgcggaagagcgtggtgccccgatgtatccaactgctcgcaagggagaagggaagatcctgcggcctcaatacaaggacatcttacaaggtatgtacgagatgatcacagaaaaaaaagtagggcaatgctgacagttatagaccctgctaatgctttgaacctcatcaaccactccccacctcctatagatgcttcgcccaaagacagggacatccattcgagtcgcattacgcgaatcaacaagttcaagcgcatcctacaagcaagtacggtatctcctactgaactgcgggatctcgcttggtcaggtgtcccggaagaagtgcggccaatgacttggcagcttctccttggctatcttcctacaaatagtgaacgacgtgtctctactctggaacggaagcgtaaggagtaccttgatggagtccggcaggcctttgaacgaggcagcgggtcaagctctgcaaatccgccttcaaacaagggccgcgggagaggacttgacgaggcagtatggcaccagattagcattgatgtcccgcgcaccagcccccacattccgctgtacggctatgaagccacccagcggtctttggaacgcatcctttatctctgggccattcgacacccagcaagtggttatgttcaaggtatcaatgatctagtcacaccattctggcaggtcttcctgggcgtttacataaccgacttgaatgttgaagaaggcatggacccaggccaattgcctcgaagtgtgttagatgcggtggaagcggacactttttggtgtctgaccaagctgctggatggtatccaggacaattacatttatgcccagcctggcatccaccgacaggtcagggcactacgagacttgacagtgcgcatcgatgcagcactggcaaagcaccttgagcaagaaggtgtggaatttatgcaatttagtttccgatggatgaactgcttgctcatgcgggaaatgagcatcaaaaatacgatacgcatgtgggacacgtacatggtatgtttccccctagggaactttttttttttttgcatgatactgatcgtcattctaggctgaggagcagggcttctctcgattccacctctatgtctgcgccgcattcttggtcaaatggacggatcaattggtcaagatggatttccaggtacgatttccgaggtgaatatcgtcactattagacagtaactaacgttctttcaggaggtcatgatgttcctccaggcattgccaacgaagggttggaccgagaaagatattgagctcttactgagcgaagcatttatctggcaaagcctgtttcaagactcgcgtgctcatctccggcctgctggtgatgaacctcctggaaatggtatcttttattgatagtaatcataattcatgacccgaattctcaacttctgttttcggatgcttttcccggggcagacatgatctgtctcgctcaattgaaatgaatgcccttttggttgaatgcccacagcagcttcaagaaatcattctcatcacacattctcgcgcgcttctctccgaggccagtgtcatcgtccaggacctggcgcaccttttcacggactagctccgcaaccttgccacgcttcttgcgcgaagctccattcttgagtgctgcttcgaggcgggcatttgtggtctccttaaagaaatcaggaacatcgtcatcgtccatatccatgacctcgtcgaccggttcctcggcagcctgtccctcctcttgctcctcgcccatgtccatcgccatggcatcatcattggcgacttcaaccgggccatcctccactgggatgtcattttgcgcacaccatgtccgatagtttgcctctagcaattccatgatgcttgacgtaccaatgaaactagaccggagagtcttgttcttccgaacgaaaacaattcgcaaaagaccatcccactcttcgtagttgacctgtggtcgtggattcttagggaccattcgaataacgctggactcgacttgtggcggtggcttgaagttgttcttgccaaccttcatgatatgatcgatcttggcccacatttgcgcgttgactgaaagtcgactgtaaagtttgtcgccgggcttggcgaataaacgcagagcgaattcacgttggaacctgtatgggtagttcacatgtaagccctcaattacacagacaacgtttctgagtacgtctagccttgatgacggatacttacatgagaatgcaggaacgaggcgcaggagatgtagctaggagtttgaatgtgagaggagaagagatcttgactctgttagactcgggaagaacgttcgtaaaagatttggagttgtacatacctggtagggagtattactgatgcagacatcgaagtatgggagctctgtcttcatcacatctccaagaatgacctctaggcgcttttggtatggtgtggactggaagcgcttggtgacttctgcagccatacgaggatccaattccacggcgatgcatttcttcgccttttccaaaatcttggctgtcaagttacctgtaccgggaccaatttcaaggacgacctgttgattcacaccattagtgtttgtcaagtcaactaatgtcttttgtaagtcactcacatcgctttgcttgagctcggccttttccacaattgcagctagataacaccatgttaactatagaatactcagtgcagtgaaaagaaacccgtaccagcgataccagggttcttcagaacgtgctggccaatatcagtgttcatcttgaagatgctgtgagcagcttttgtcttggcagcagcatctgacaggccctgcgaagcggcgctgttgcgcttcggcttgttgacctttggcatcttgaaataacgagcctctgtaatttgatagatataagaagaaaccagagagaaagcctgcggcaacaaagtacatcgactccaatgtgggaacttttttttgcgataagattgtcggtcctggaattactatcttccgggcccgccgccttagccttctgcgccgtcgacgtcgagctcttcgaattgtgttgtgcccaacatggcgtctggaagaaaggatttcctgagccaggcagcgcctgagaactatgttgctggtctaggtcgtggtgcgacaggattcaccactcgctccgatcttggcccggcgcgcgaaggacctacgcccgaacagatccaggctgctctgaccaagagagctcagcttctgggagctgctgcacccactgcctacggcgccactactcgagaaaaaggcgggaaagaggaagatcaggaggaggaagatgagcggttccaggaccccgagaacgaggccgggctgttcgcatacggacagttcgaccaagaagacgatgaggcagaccgcatctaccaggaggtagacgaaaagatggataagcgtcggagagcgcgcaggttagtaatatcccctcccataaccccttcaaaaccatttgtttatcgggttagccccggttgtttggacagagtaccgacatgaatcgttcgccacctacagggaagctcgagaaaaagccgaacaacaagaatacgaacgcaacaacccgaagatccaacaccaatttgccgatctgaaacgcacactggcctcagtgtctgaagaagactgggccaacctcccagaggttggagacttgacgggcaagcatcgacgagataaacagaatgcccgacagcggcactacgccgtcccggatagtgtcattgctggcgcgagagactcagcgcaatacggaacgacaattgccgaagatggtacggaaacgagtgtcggcgaaggagaaagcgcagacagcgccatgatgaacttcgcagatatcggtgcggcgcgtgataaagtgttgaaggtccgacttgaccaggctgcgctgggctcatccaccgaaacatccggaaccgctacgaatgtcgaccccaagggttacctcaccagcttgacacaatcagaggctaaagccggtgaagttgaggtgggcgatatcaagcgagttcgtactctgttagaatccgtcaccaagaccaaccctaagcatgctcctggttggattgcgttagcccgtctggaggagcttgccggccggattgtggctgctaggacactcatcgctaagggctgtgaactttgcccgaaaagcgaagatgcatggctagagaacattcgactcaatgaaggtcacaatgcaaaggtcattgcagcgaatgctatcaagaacaatgaccgttccacaagactctggactgaggccatgagattagaaacggatacccgtgccaagaagaacgttcttcgacaagctattctacacattccccaatcggtgcagatctggaaggaagctgtcaatctagaagatgatcctgccgatgcgcgcttgctgttggccaaggccgttgaaatcattcctctgtcggtcgagttgtggcttgctcttgctcgtcttgagacaccagaaaatgcacagaaagtcttgaatgctgctcgcaaggctgttcctaccagttatgaagtctggattgctgcagctcgactccaggaacagatgggtacattcgcgaaggtcaatgtcatgaagcgtgctattcagtctttggctcgagagaatgccatgctgaagagagaggaatggatcacagaagccgagaaatgtgaagccgaaggcgctgttcttacatgtggtagtatcatccaggagactctcggatggggcctggatgaggatgatgatcgaaaagatatctggatggacgacgccaaggccagcattgcccgtggtaactatgagactgcccgggcaatttacgcttacgccctgcgagtctttgtgaaccgccgatcaatctggctcgcggcagcggacctggagcgcaaccacggcaccaaagaagctctctggcaggttctggagaaggcagtcgaagcgtgcccccagagcgaggaactctggctccttctcgccaaggagaagtggcagtctggcgacattgacgatgctcgccgagtcctcggccgtgctttcaatcaaaaccccaacaacgaagatatctggctggctgctgtcaagttagaagccgacgccaaaaagaccgatcaagccagagagcttctggctaccgcccgtcgcgaagccggcacagatcgcgtgtggaccaagagcgttgctttcgagcggcagctcggcaacatcgacgacgctctggacctagtaaaccaaggcctccaactcttcccgaaggccgacaagctctggatgatcaagggccaaatctacgaagcgcagaacaagctcccgcaggcgcgcgaggcatatggaacaggcacccgagcctgccccaagtctgttgcgctatggctacttgcctcgcgactagaagaaaaagcgggcgccgtcgtccgggctcgatccgtcctcgatcgagcgcgtttggccgttcccaagaatcccgagctctggaccgaaagtgtgcgcgttgaacgtcgcgccaacaacatcgcccaggccaaggtcatcatggcgcgcgcgatccaggaagtcccaacatcggggcttctgtggagcgaaagcatttggtacctcgagccccgtgctcagcgcaaggcacgcagtctggaggccatcaagaaggtcgagaacgacccaattctattcattactgtcgcgcgtatcttctggggcgagcgtcggttggagaaggccatgacctggtttgagaaggcgatcgtcttggatagtgattacggtgatggctgggcttggtattacaagttccttatgcagcatggcactgaggtttgttatcccccttccgctttttcattcattctttaggctctctgttattattggaatatccagctgacatctacgttacaggaaaaacgatcggatgtcgtgtcgaagtgcatctcgatggaacccaagcacggtgaggtctggcagtccatcgcgaaggacccagtcaatgcctacaagaccacggaggagattttgaagctcgtggcaagtaccatcaactagctggcatgttcattgggggtgtattgtctacaggcgttcgggggcaaatcgcccatggaattcaatacttgacaggaatctgtctctgttagatgtctaaaagtccatgtcctaatgtgtaactatgcaataactctcaagataaccaagtagcaaaatagaatccatgggtatcgagcaagcttgacctcctcttgccaacaggggtcatggccatccggctttttaggtctcttgctttctcttcatcctcgagatatcgaccgcttcgccttgtcccttaagaagcgatactgtacatgaccaagataggaaggtgaaacataggggacaaggcagaggcggttaagacaatatcttcaaactccaagtccatatgcaaatcatgtggtgtcacaagtagtgacaggccccccggtagtacccagacgccgtgagccaccatccaaaccgtgagtagaataaaataaaataaaaagagcagaaaaaccatgtaatgtggcatgtatgaaacgggagtaaaaaaaaagtcaacgggggtataaaattatcatgcggccatggacagacactcatcgagcaaagagctcaactgattccgatcaccaattgtgccaccttcccagtctaggagagaaccgtcttcgtcttcgtcttcgtccaagtccatctcgtcttcgggtttgacatcatgatgcggctcaccaacgccattctccagccgttcgtgtctttcggtctcgagttcgtcttcgaggtacccgttcatgatctggtctacaatgagtggcatgtgaccgaggacaccaccgcccaactccaaagtcaaccgtaggtctctaacgcccaatggttttcgaatgctggcctctttcgcttcaacggggagtaggcctgtggccgcatccttagtgatttccccacgtgtgtatgcgagttcttcgacttccagttggtgtcggtactgacgcatcatcatgttattgattgtaccggacgggccattcgaacgggtgcgcgagaataccgcggacaagacttccttcacgaaagtctccgtcgcaattgccataaactcagcacatgggagccctgcaccgctgggtagagattcttcgtagcatatggggaccatgcgggcatggatggattcggcatcggggaattcgcctgtttctgcggccaggggctgggcatatcgttttcggatttcgagttcccagtctgtaattgaggaggaaggttaggcactatttcctgacaggggaccacgggaacggagaggatatctcgagttcgacgcgaagggtgtcgccttactagttttgttcagtccacctgcacttgcggggacctggctgggtaatttgaattgcttagctagatggctttcttccagctctgtgggcaccgtctcattgggatctcgctggtaatcattagctgtgggtttctgggatgaaggtgttcctcatcgtttgcgactacgtacctctgggattccctttatgcgccgacggtccctcggaggcaatttcataacctccgtcttcaacctttgttccgcagcatctccggagacgggtttcgacacggttgatggtttatcgttggccgatacccagtttgcgacgccatgatcggggaggtctcgcgtgaggtttccgatgagcgcgcatacgaaattgttatgtagatgttcgtttttaggatcggcgcataagaagtagtcgactcgtgatgagtattcgctctggttgtaatgtcctatccatcaggcaagaggtcaggaggtgatcgaaccgaggccaatagataggaagggggaaacagtcggcgcggagctcaagcaatcgttctccgatgagcaattccatgcgcatcatgacatacctagtaagaaaagggcagtggactctttgtactcagcccacttgtctccgatggcggccttcaggtccgtgtaggcatgctccagctctagccgcggtaccgatatcagagctctggaggttttcgcggatactgagccgttgggcacggcgccctttggatttgagacagagtccctccgactcagagctgccggatcaatctgcatggttgctggactcgcgagagcgcgacggtcgacgccgaagggcagggaatattggcaactacgccttcatcaaggaggattccagggctcaaactagaaatagaggaagagagactgatttcataagagaacctgatgaattgaagatgagaattgatggagtgaaagagatggcgatgggtttgggtggaaggggaggttccgacttgcggttccccgccagtcgccataaacggatacatcgtgtgccaaacttagcagcgttgcctttatgtctacatatatttctctacattgaaatttcaggtgcttttcaaattgattcgctagaattttcaagctagctgcactacgtcttcacttaataccccaaagagttgaccaatctctgcaatgatctccgtaatctcattcgataattggcccgtcaccaagactagaagtacaatgcgtcagcatattgaatgggatagaaccagaaaccaagaaatactcactgtaggcataaagcaaagcacaatcctcatctgtagtctgttgagatgcttcacgatccaggcgatagcgatagatgcgggcaagcaatctgtctctggcatgctcaatgctagggagcacatcactcaaagggtactcgagtttcattgacgaagcaatcactagaatacagtcagcacggaatcaattgcacggtagttgcaggtgggctgacctgataatagatggctcacacgagcagataactgctgccgttctaattttgtgtattgaagaaggctgatttcaccttcagtggccacatcattcttcatcagctcgatgttcatagtatggagagaattcaccatgctgcgtgtacggcgaacaatgttggcataagaggcttcggggaatgcactcttcaattcaaattcggagcctgctgcagcctgaagagactccaaccgagacaaaaatctctcaatctcgagcttctctcgaggcgacatgtataaaacagacttttgacctttagccataatggataagggatcacgtttccagacaaggctcaggtgcagccagagaagactcagactatccttgagcttacgtcttgcactgatgggccaaatcattcgagtgatgatgattccccaaatgcatccaggcaacacagcaacaactcgatggagtgcaatttcggtcatgattggattagagccgccttcgtcttcatcgaaattcgcccccttctgagaaagggaatagccgtatagcacagagaggttgtaagtgagcatgatgaaccggcccatgggaccattcccacgaacaatagtgatgtatccggtccaaagcgccattatccatcccaagaatgcaagagcaaatacatttccagcggtgatgttccatgctaggatagcagcgactgcccccagacaagtaccgagaaaccgggcataccccgtcgtgttcgaggccccaattgtcattgagcaaaccagcatgtaggacaacagaccccattctccccgccaacgccgatagaacgggcgggttgaaggaagaaaagcaggcagggcgtaaattgcagctcctgccccaaccttgatcgcgtatttcgtatcatctcgtcggaaaaccccaaggcatttccatagacggtaaccgagtctttgctttgttgtttcctttactgaagggcccttttgtgtctgaatattgtcagggagtgcattatgtgcaatcaagccgtctgatgcatgcctagcatgcccatgcaggtcccgcccagtagcgggtggattggatctggaagctgcttctgtaggggattaatttgatatccgcatatcagcgactggtgtgtagaggtatacgtaccatcgtcagaggaaactaatttggcggcctctgtatttcttgaccactgccagacttttagccacgaccatgttcgcccattaggccgctcttcgacttccaactgcagctcatctaaaatggaaagcatctctcggagctgttctccgaattcgaggagggaaaaactgaaatggccacagctggctgagacttcttcaagatcggcttcagcttcgcgggtcttcaatttcatggtttcctgttgttgatacaaggccgctagtgtcttctcgcgcgattctttgtaaagatcaagcgcccggtcaaggctgattcgcagccgaccattcacggagactctgtagttcggtgcaggcccaaatggaatctccttgaagatctctttcaatgtaaaggccaacgatcgctgcttccagtcagtcttgaattgtattaaatacttattgagttccagcttaccattgcagggcccagatgagagatgaatatagtgaagacatctgctggaagaagtgcgggtctgggtgttgattcagcacttccaagatcgtcggaaccgtctggagatacttcttcctctggtcgctcaacgataggctccagaaatgacccatctgggaacgaccaggatcgctcgagcggcgtgaaatagtccacatgagttgcgctaccctgctgatcttccgtagaggcagactcacgggcaatggtctcacgaatcaaactgaactggagagaagctgcattacgcagccctcccatgttgtgggtgatatcttgcacccagcggacgagattcttttcgagtctgtactctttttcggtgcctgccacatagtgctcaagtttagcttctcgaacgagcctgtcgagctggctataggccttgcggtgcctcgcctctgcgtcaacgaattcggccgagacaaggacctcttcactcccggtcaagaaactttctgtgataagtgccatcatgagagccaatgaatcagtgaccgtgacgaggttcgcgcgaagcttcttacgcgctgatatggggaagacgcaaaaggatataataatgacggccaccacacccatcacgaccatcttcaagacttgaaaggttttggcaagggacaagtcgccgctttgcacagcaccctccttagtcaagacggtgattgttgacagagcagtgagcgaacaggcaacgttcaccagaggatctcccagtcgttgcttggtccacccgacaaagccaagcccaccgccacaaaatactatcagaaccaccgcatggccaagagcgggcaatttcaatgtgtcctggaaaaacatctccacgaacatactggtaatggtcaagaaggtagaatagcagaacgccaggaacgcgcagatcaaggccttgaacatcgctccctgagatctggcagggtggaagtagaccgtgaccgtagccaccatgtgcttcccatcctggtggcccagcaaggctgagaccgcggggataaaggttgcaagagatccgaccgagtacgcaagactgtacttcaagacaccaatgcccggttccgacctaacgaactgatttacctgcgtccatctttcatgaatacggcgcgtgagcacatcgaggtagccctcataatgttggatttcgtttgtgaggagcccgcgcctttcctcattttcgtcggagaccggtgtggaatttcggaggttcacgaggcctttcaggcgctggcctgttttggggagaacaaatgtcgcctgacgaagcttcaccgacgattagtatctctcgagtcagaaaatgcgagcacataccgttgggcgcgagcggcgggagctgctgggagtcgcggacatctttcaggtttcacgtacttcgcgtggactcagggcgttgtacaagccgcatggcacattttcaatgactcgccctttctccaggctttatgaagacgtcagagggttgtgcggaggtgcagggagctatgcaggttaattcgttggcagcaattcgaaggtaattgcggccactccccgtttgtcattgccacgcacctctttgttttgctttttgctttcaaaagtggtgctacgactcggaggactttgatataaatagatctgatacggagtactgatttcgaatctgcctgatcaacaaagaaagggctcggtctttataattccgtagcaaaattcagccacaactacttcacatttatttcaagccttccactttccacaccttcaccgctgcatcggcaccagctgagacaatcttcgagcctcctgcaacccatccaacaccatggacaccctccttgtgagcattctgcagctcaagccagtcgcctggcttagccaagctccaaacaaagatgtttgtgtccagcgatccactcacaacgtgtgagccaccctcgttccaggcaagtgatgtgatccttgcagtatgcgccgtccagcggtctgtcaccaggctgccatcggcaaccttgaaaaccaggacacgtccccgcaagtcacctacagccaagtgggaggcgtctggggagaaggcaagagcagagattgggttgcgagaggcattgatgtctgcccggggagaaagccgtgagctggagatggcgcagatctgaacagatccattctcgcctccaacggcagcttgagatccgtgtgcggctacggttgtagccacaaagtctgttttgtattctccggtcttcttgccatcctggaaaatctcgacggtttcggcttcgccgacaagaaccgtcgagttaccagctgcaacgcccttcggctgtccattgagttttgaagcgctgccagtgtatgtcttagccgcgacatcgacagagcggagggtgtcgtcccagccgacactataaattctaccgcttccctctggtgtagttgcaagcccggcgacgtaaccggggtgggcatctccttcaatctcctcagtcttacccgaagctacatcccaattgcagactcttccgtcaaagctgcctgtccacaaagtttccttgttatccacagtggtctgtgccaaggaggtgatgctcttctggtggcccgagacaacctgccggggctcgggagtgccctcgaccaggtagttcaagtctccgctgagagacaaactgatgagcaagttatcgcttcttcctgggggccagaccacgccaacttggtggtcgcgaacagccatagcaccctcctctcccaaggtccagctctgtgttgctttgccagcttccacatcccagatcttgacggtccggtctgcacttgcagtcacgaactttcgcgagtccttggcccaggacacaccaaagatactgcctttgtgttctccctcgccaatctgacccttggtctcaccagtcttgccgtcgtagagccagatcttccggtctgcgccaacactgaccaagtgcgaaccatccgggctaaatccaactccgtaaatgtagtttgagtgcttgtcggcgattccgttgttgaacttgaacggcgctccgtggtagaagaccgtcttcctgtcgtcaccagcagtggcggcacgcagaggccgctgctgcctaattgacaccgtgttgagctgttgcgtatggccgtgaatctctccaacggtgtttccactatcccaggtaatacagtgtccatatcgctgcttgccatcgccgacggcaataatgcgctgggagtcaccgtcccaagccaaatcgttgattcgaccattaacaatgctgtattcacccttggtgattccttcgccgacacaatcccacactctcacgattccagcagcatcaccacttgcaacgtagaatccggagggggcgaagcgtgcgacagttgtgggcgccttgtgttcagtgtattgtctagcgactgcggggtcgtcgattgaacgcaggaagatggatttgttggactataatggcttgtgtcagaacaaggcaatgttattgtagagattcttgcaataacatactgcataggccaatcgctcgcctttagcatcagaagaaagctgggtgggctggccgcgggtggtggaggggctagcagcccaaatggattctttgggtatgtcaggctaatagaatacgatatgaggacgtcgggtgctcaccattcgtaagtgacattgctaaggtctgcacactcaagcagaagagttgggggaagagggaagtccactggtccactgtttatcgactgacgtacccgggccacaatagcggggaacacagccacgtcttgtctacataaaaacaagcattgagaatatgcagggaagaggaatatcagtgtcaaaacacataaaacacatatataatatacctggtagcttaaaatatttccgcacaaaggaaggtgaaagtcatagctcccaataaaatcaatgcatagcgctaagagtaataatacacgaagtcgtgccccttccacaaggcaccggcctgtacttgtacagggaaatctcccaaaatctgtttaagatcccaaaaacaatgactccaaagtagtacgttcagcttagaaacctccaggaccctccatacgtgcccgcatttcggatgcgagaatttcggggtgccggtgaacactaggcataagacccatgccgatggctctccggagtgctttagcaattttgcgttggttgacaggtcgaagaccggtgacagatcggggtttgatacggcccatgctggtcatatattcggacatgacagagaagttctgtaacagcaaaagagcgaacagttagtggctgtccatcatggtatatactccatacaaacaatggcaccatcggcttgaggactccgtaccttgtacaaatccataggattcaggttcaatgcatcaaaagcatctgtctgagggttctggcgctttccccatttcttcatctcggccgggcttagatcgtgaggggagtagatgtctccagccttgaagtcacgggtctggtatttctcaagggctcggctttcgccttgcgccttctggtcctcgagaaacttgaggcgactcggtaaacggcgtctttggaccacttgggaggctatcgcaacatgttagtcgctgattgcactcaaataatgtattcccatatcatatatcgggacaacaaataaatcatctaggtgtactgggtccatcacatactctgtgagcttgtgccgcgctgggaagtgaaagcgctcatggcagcggttgagctccagcgacagagcgacaggccaacattggctgtggttgcggcattgcgcagcaatgacggcgaggaaaagaggttcaaagacatcttgacccgtcaattcccgagtagtttgtagacgttgaagacggtgatagggagaccgggcaacgcggagatgagatcttttttcgccaagacttcttccgcctccagatctctccgcgtcgcgaacccccatttttcatgattccatgcagattgcaagtcaacctggaactacacgctttaatccaatttctcattttctcatctgggcttataagctccgcccatactattcataatgcagtcccatctcactagacgggtcttccgggcaatcatcaacaatgaaccacttcggttctcccaatgccaccgaaatcgcctattgcacacaaccacgcctgcccgagtacgacctgcgatgcccagcctccattatacatcgcgacgcaacatctttgtcttcagctctgaccccgaacggtcacaatctactttgccctctgaaaagggcctgaaaccaatggctgacttgatgagggcactcaaagatagaagcagaactcctccgagtgatattctcgcaaaggcattccaaacctttttcacaatgcggcttgaaacaccaatgctcatcagtcactttcaagcccgcgcgctgatcgtcaccttcaaacatctgagggcccagcaggccgaaatggaagaagaagactggcagaatgttttttcgactgagagccttgaaaaagtgttggacgtactctccgaatgtgattgtgctccacaggctcgcgaggttgtcatgaaccttgcgcgatacgcatatcaagaattaaacctcgatcatggatttggtccggggaagatcagccggccagcccttgctctctatatcaatatcttggctatgaatggaaatcccgaggatgctagacataccttattgaagttttggggtcaaatgagcaaggctgtgccgtcgccctggctcacaattttgaaaggatttgccatgaaggacgatctccgacaggtgcggaagattgttgatgagtggggaaaccatggcaacaagtttgaccaggccacccatggagagatagttaggttcctcgtcgaccacggtcagtggaaagcggcccaaactgtctacgactctccaatcgccggtggctcagaaccctctatggctgcgagagaggctctcattaaatattatctcttgaagtcgcgtgcagaatcagcggaggagatcttcaagtctcttcccaatgagcccaacgaagacaccgctggcatcattttgctctgggaagcagcaaaggggagcaatgcttctactcttgcgcaaaaggtcgatgcatggactgcgaaaaaccctcagctcaagggctccatcaacattgacattgttaataaccttatccagtatgcaaacgcggcgcagaacccgcagttggcttcggatttcatgacgctcccaggccagtggggtcttgtcccagacagccaaactcatgtcttagaattagagtcccgcgtccaggccggcgacgtcggcgagacgttgaagatcctcgaagaaaaggttgacccgacgtacctcacgagtcacaacctgcccattgcaaacaagctcatcgcgatgctctgtcgatccgaggaaaaggacgtcttgttcgaccaaatctcctccctcctagacccacttttccaagagaatgtgtacctagagcctgcgaccattgccgcattgacacacatgctcctttaccgccacgacctcgatgctgtttcagagttgctacgtccacgactaggtagctacagcgacgaacagaagatgccgatacgtgacgctctcgcggagtacatcatggacaaaagccagtctgatacagacgtgtggaatgcatatgagcttctgaagattgcattcccggaaacgtgggtcccagttcgcaccaagatcatgacctccttcttcaaccggaagcgcagtgatctcgccgtcttggtatttggacatatgcgccaagccgacgaaaccggtcggcggcctaggccagacacttacgcccgctgtttccagggcctggctcgcacggcagatgcaaccaatctggagcttgtacacaatatgctgaagctggatcttgaagtggatctcaacacgagaatcctaaacggtctgatgatggcgtatgcggcgtgcgagatgccagaaaagagcatggaaattttccgacaaattctcaagtcggaggaaggcccttgtcacaagactgtcacgattttcttcaaggtctgccagaagcatcacaacggtgcccaggaggccatcaagatgatgactaaggtgaagaagctggagatcacggcgaatcgcccgctctattcggcatatatggaggccttagcggcgcaatgcgagtttgatctggccgttgaggctatcgacaatatggaagctgagattgggattcctcctactagcaacacgtgagtacattcctctgatccctgtgctataattgctaatatagatcctagcattgggctgttctacaacgctatcccgtaccaatattggaaagatgaggtggagaaatgggccagtcagaagtatcccgagcattgggaacatctgatgacgataaaccgcactgaccaagagcaagggttggagtttgacggcatctcaaatgaggtgtcggtgtaataatctctgtatcaaagtagcaagccaatgtatcataattcccataaagggggcaccgagaatccattcccctactggtagtttctgtaggtaataagcatgttcgccgcggatatacgggcgtgttgcttatagcattgaggtaagacagactttctggaattcggcccgggctatcgtaaaactagactcagtatagagagcgcttgagagaagaaattggaaaagaggaatccaagaatacgagagacaaaaatcgatcattctgttcctcaccatagctccgtcaataatttgaacacgactgctttgcctaccgactatccttcagtaaaccgcgaaaacacatccgcagtcgcagtggcatattctctctcaatggtagcccgaatgacctcgttgcggacttcaggtcgacaaggataatctttggcacagtaaaggaagccgttatggtacccagtcaccggatcactatccatggtaccctctcccggctggaaatcaaacgcccacagcaatttagcaatggctaggaacatgttgcgttcggccaggtggatgccagggcagatccggcgtccaacgccgtagccgtagtggtcgcgacgctcccatgtacccgggacatagtcgggagctaattgaggatggttggcaaaacgctcggggatgaaagcagctgggtcatcggtttgggagggatccatgtgcatcccccaggtgttgatcacgactctcgtgtctttggggaggaatttaccatcgacccagtcgtctgtaaggattggtatggttagaagacactcataacaagacactcataacttggaagaagggacggcaaataacataaatggaaagccagaagaaacagatagccttaccctctcctagtgcatggggaaaacatagtggaagtataggcctccaccggtggccttccttgacgatcatgttgatataaggaagtcgctcaaagtcctcccatacaggcgaccggttgtggccgaccacggcatcaatctcagcatgtgcttttcgctggacatcggggttttggaccaacgcttgcacaatagccagagtgagactggaggtagtgtccgagccgccttccatcagaacaccgccgataaaggccaactggtgccctgagagattatgtttctcctggctatcgaggaccttgtccataaaggtccccttattgttgccatcttcccgtcgcttaatgacctttttcagaatgtcgacgtagagagtctccatctgcacaccgatggccttcgcccgggtgatatagttattgaatagccactgtggcagcagtttcaaccaggggaacatatctactggtggcgttgcaccggtttccataatttccgaccattcctccatgagtttgtaaagccgtcgcatgtttgatcccttacgattggctgtgcggattccgaaaactatgacaagactttaggggagttccagcagcgaatccattatggaagacttaccgatcgagttggtgatactgttactgtaccgcttgggatgggccatatggtgttccgggtcgaccatatagtctcgaaccagctgtatggcttcggcgttgacgatctgggtgtgatgggtttccaccatcgtctccatcaggtgttggtgaaccagtcgtcgaaaggtgcgccactggtcgccataatgcatgaccagcagatgatttcccttggtgatgagatcgtgcgagacaaaggaatggggccgatggctgtagatgccactcttgcgatcgaggacttctttcaccagtcggcgatcggtgatgacggccatgttgccatttccaatcttgagcatgtacagcccgccatactgggcggcccattcggtgaatctgatgtccgcaagacattggcggtgagaattccttgcgtgtttcaaaggataatggggaggttatcgaacatactttatatgggtgtacttcttggtgatctggtggatatttccaatgaagggtagggtaggtggacctatatcagatgagaaacccctctctcagccaactttggagacgataactcaccattaggcatggtactgatccgatggccatatgtgaaggcatattgtacgagcacgatagccggcaacaaaaccaggagtagcagcaataatggttccatagttggtaggaactattgatactgaaacagttccacagggctttatttcttcagcatcgagttgacaggtgcccaggtgggtatgctgacttatagatcgacaaacgcgggggtgatgaaggtgcatcatgcacgggattagttgccaccgacaaagaaacccaaattaccaaaggagtgtgctggctaagattccccttggagaaacactctcttcccgtggagttgagcgtcgggttatggagtcagctgaccataaaagtgaaaaagatacgatattcccaaaacaacgagggtaatttcatgtaacctggtagtatctatgcttggtacggatgacacgaagagggaaaacgacgatccggatgatgtgtgctctccgtagaacacgaggctattgagagaagctatggttgtcctaagtgagaccaacaaatccccaaatactacattcagtgcctcgatacgatggtgcgttgaaagccaatcctttactattatccatgaatatccatattatgctatataaatagtcattaaatcattggcaacgttatctcatcatgcttggctccaattctcttccagtagcttcttatttaaagctagcatcgagcctagtttcagatcctcgctttatctgggatctccttaagccgcggaaataactccaatgccgccccgctatatacttgtcccttggtctcccccggcagctcatacgcctccagaaagtcagtgaagcgttggatcgcgtcgtgcggggcattggggaaatcactgccgaagagcacatggcccggcgcagcgaactcgaacagcgccttcaacgtgacagggtttgaggagatcgctgtgtcgaaataaaaggtccgggcagcctccaccagctcttcagttcatagaccgagcgtgcgtggcataaaaggcagcatggtagccgcccgatggatgagatatggcaaggtgccgcctgcgtgagagaggatgatcttgcaacccgggtaatcttgcaaaattccgcttgtcagcagatccatagcggcccgaccagtctcatgcggatagtcaaacatgggctgcggtagccattggttgacgagctgcgtatcgaccggatgggtcggatgaatgaagactacagcatcgcggcggctcagatcagcccatatgggtcgaaaggctgcatgccccaggtaattgggaccatcgccatagcgggtaaataacgtgactccatcagcacgcagactggtgtaggcgtagtcaatttccttcaggacggcctctgtatcgaacaaggagggcaccgatgcgaagaagccatactggcgcggttgagcgtcccgaatggcggcggcagattcgttgcaactgcgcgctaaagtggcggctctagcagcatcacgctcgatgcctggccccggggcagtcacggagagaatggtagtggtcaccttcattcgtcgacccatgtcctggtccagctccaacgtccaaggtggagtgtaccagcccgagggatcgcctcctgcgcgatcaagggctatctaacgttagccaacggagctcccattccaatacgagtgggactaaccttggcgcatgaccggagggtaaaaatgatgatgcacatcgattttcgccatgatggccatttggggagcacttgcaggtagtactgctccttttgcaaaccagcacttagagatgggattttatttctcaaatacagatctctggcaacaatgtcgtttccgactgactgactgccggtcttcccaccttgcatacggcggccacacttccctgattatacatgcaggacctccgaaggtgacttgacggtgtctagtgaggcctgcagggattgcggagcacccccaaagagcgagcgagtgagcgagagagagttcgacgacggaaagaatacctgcaggactgcggggtatgcttgtggaatctgcccgcatatgcccacaggtgtgcgcttgccaaatggtggaattcatttataggcgcttattcttctcatcacatcacaccctggcctggtgcttctgaaacaggagatctctccgaatctcctcagggatgatcatcgttcctgcagaaatactgtgttcttccgctacagtgcctggtgtcggttaagcatcagctatgctgccctgggggttggaataaaacattttggtactatactatcgacctgaagaatgaacggttgtaaatgtgcccttcactcactgaaattcaaaggtctggttggccgaacacacccgcgctagagcggcccaggtcaaaataaccaccttccccagaatgcacgagacgcctagagcatgaccccgtggagggtgggactgtcgaacgaccgcgaaacgtagctacagtcataaatgaccggctccatcaagtagccgagaaaaaatccatttcgtatcaaatatcgcgtgagtcctgtccagtagaagaataaaagccaccgatcctaaggtgaagcctaccccgagccaagcgagccgagcgtactcaaagtcgccgataacgggaccattatgtcagccacgatggcattgtccaagccatagagtaggttggcagagaaaatggcaatgcagacgagtaggcagcggaggccgacaatttctcggcgcgggccagtatccttctcggcgtcttcggcttttatgatgaactagttcattcactcgatctggggtttggcattcgtgaacggtctcacttggcatggggagcgaatcgagctgcatttagtcagcagcttgaagaatcttatcagctctctatgtgccactgcccaatggagttgtaataaaccgagaatggagggcaacaatgtatgttgtccactgaggttgccgaatgtactgatatccatattgatcaaacatatctggttatttaaatgcgagcagtgctggaaggagacattttgatgacagttggcattcatacttgtcagtttgatatctgcccaggtgaccaactccgaactcctttcggactgggagcgggagttcccgagctaacctaatcttaatcacgaagtgggtccatctggcccccatgcgtgcggtgagtacatatccatacatattatacctacgcaataaatatctagggcctagaaatgcagaatatctccggagatcacttcgcacaccgaatttatatataaacacttttgagtcatctctcatgatacgaccgcacaacgattggctagacaacgcacgttccatttcagctttatcgagtacatgtaatccaattttagctctccagtagccgatgcgagaagagtgccatgtctccccccagaaacagtaagtagtatgcatatcgccaagttaaggagaggtaaaaatatgcaactaattggaataaatacatcagtgagacgcccatatatattataaatcagttataaacccagttcatatcctttgtacttctctccacctagcagggcccgctgcttggttaggtagggactacgtattacataagacgggcaaaatataaaacagcaaggcgaaaaataaaaacagagaagacacacggctaatcacgtgtccgtggtccaagaatccatgatcatcgtactggcatgcagccactgggcttcagtgccaatgaccatgtccgcagatgtagccggcatcgacagggaacccgtccccaaagtcggggatagctcggctagtgacccaataggcatcatatccatcaattgcatacgctcctcaaagttgggcattagctgatgggactcctccagggtagtcggtggcagcgctcgcttgagggggttggaccgggcctccgattgttcgggcgcgacgaatgaggtcttgttcgacgacggcctttgattctggacttgggacaaggactggctggcacgcggcgctggtcgcccagtcagagcttgttgaacgctgttgatgagtcgatcggcctgacaacagacttcgcggacgacctgcgccgcatttttggctgccaaaatgtgatcgctcacgagttctagcgtgctaatcgctgtctgcagcgacttgcgggcagaaggagtcgggggacaaaccggattggagagcacaaagcctagggtacacaggatggcatcccactgaaaatgaaaggcgcacgaccagccgcggaggagatccgtctcggagagcacttggtttaggatactggtgatcgtcatggcgtggttcaaacaggagatattgtaaccgtcggtccgtggggtcgtggaagacctcacaggagggaatcggatgaaaggacgcagtgtggaaatcacaagatggtgatagcggacctccaggaggacgcgttggcgctgcagccagagcggactatacggacacaggttcagagcgtcccgattggtagagaagggggcccccgtccccttacgagcattacatagggactgcggcacattttgaacccaattatggatggccgccatctcctgcccgagaaactcagccaaggtctcaaggacgcgtggatcctcatatagatctttggccttctccccattcagcaactgggaacatttccggtgtaatgctgtttgcactccctggacgagaaacccgagcttggtgcactgcacatggaagctgagccagctgatgtcctcatgatcggagaggaggactgtgccagatagctgggcgtgctcacgaccatctccggacatcccacagctgacatgggacagttgaatgagtggcgaccgacccagggtcatcgagacctggttgtcgagccgatatagcgtccaccaaatgcgacgctgtagctcctgctgttcgagggaggtcccgtccagcgggcgcatatgcagccgcagcgcttgggcggttcgcagcgtggcacctagattaatatgcgcagtattcaaccgggaagtgttgtacaggtagacaatcgaaaagatgtgactctgcacggccttgatggttggactttcgagctcactctgcagaagtctctgggccctctggtagtaagttcgactcacaagatttgcgttcctggcctgccacccagactccaaatctccctgctgattgtccgcactgacgaaaaacgtactgccgtactgcatacagattgccaatagcgcatcgactaaggcggatggcttcctggttgacatattatcggccgagccggaccataacgagtcataatatcgctgaaagtcgcgttcatcgaggataggatagacgcaatgaaaggactgccagaacagcgcgagaaagtgttcctcttgtaaccgtgtcagatccttgacctcgttttcgtccggatgttcatccgtttggctggccgggcttgcatcccatcgagagggttgacgagacggcgcaatataattaaagcgtgacatgcatgcctccaacttcgcatcttccaatggctggtcaagcgcttgagagagatggcgactgattcgggatacaaaatatgaggacgacaagggtccgtagtatatctgcccgggctgctgaaccccttgccatccttccgtagtatttgtgagctccgcaaaatcgaacgaggtgtgggcagcatccgacagtgggggcgttgcgaaacccgtgtgtgtttggatttccggtccttctttgattttcgcgatttgatcctgaaggtccttgatcttattccgtaaccgttgcatctctctatccatatggatcagtaggccatttacattcatcactgcgaatatgagagaagtggatatttgtttcctaccggtttgcagccgggagcgaggttgcctcctgtggctttgtgttgctgcaggtacctcctcggttcaagcagttctgacatggttgcttgtcatcgcatctaacgcgattgagccggcaccagtcacacgcccgagcgacctggctgcgcttgggtcgtggagctgtgataggtgtggccgatctgtcacgggaggcgtcgatcgtagtattgaagttggcggagaaagtggagtacatgacggagcggtggagtggaggacaaaacaattcagatattcattcagaccaagttcatgcgactccaaacggcggtcggagtcttaaaaggaatttccagattactcaagactagatggggaggggttgaggggggtcgatcgcgcaaaagcaaaataagttggagttggcgttggcgttggtgcctgaggttgcatatcttgaccggaggacaaaagtacatgcagggggttcttggaagatcggctttccctgcagagcaggaaacttcacataagaactaacaaagaaataggaaatatcaaaagaccaagatcctacctaggtgcatgcaatctcactagtcttgtctattatttgctatatgggcgccaaggacgcatccgccacttccccgggttctcattgtttgaatcttaagcgtgtgagatggtgttattggttcaagtcagatagataaggtaatagatcttgagacccttcgaccgttataatcttccagggattcccatcctgctatagatagtctcagattgcccatagtactaatgaaaaagcttagccctatattggtaggacatatatatgtgggacatatatagtagacaatacactagtactatagatgatatatcatcccaggcattgcagatcgaagcaggcaaaatcgaaattgtttgtgcataggcgtgaagaaacgtattactcaagcggaagaggcatccacgagataggtgaagaaaaagaagactaatacaaaatcagctcgaacgaaatcctagcataagtcctgcaccgctaccatctcgtgcggatttttcacaatgatacaccccacggtctcatccaaacactccatggactccaaagcccaaaggcgtgctagggcagtcaccttatctcaaatgttggttccaatctgtggaatcggagtgagtctgctgttccgctgctcctctgggtgccatgcgtcacctgcagaaacggacttgccaatattccgtctgccatgctataatacgaggtgcatcatgtgcgtgcaggggtcagaatcctatttttgggcaagggttccaattgcttattcgggagaggacatcgtagccatacggctcctcggtcctctggactaatatcctgtgcgattagaatcaaaaatcgattgaagcacgggaagtaagacagatgtcagacaaaaggatgccacgccaatcggggctacagttaaattgaatgtatccacaccgaaatattgtgcattgattacaccggtgatcggcacagaactagggcttgatgccgagctgacatacatagcagcgtagatgccttcaccggaacggccgcaaacaaacatgcaatcgagaggggaaggggtgataatcacattctagtgcacatcctctaatgtagctaatcaaattgagcaaaaacctcttgtgcttcggcaaattcccgcataatggtctcccgcttttccggttcacggagacggatggcgcagccatagtccttgggacaatgaagaaaccctttactagcgccggagtgggctgaaatgtcactgtcgctgccgggtggctcaacgaactcaaatgcccagagcaacttggcaacgccgataatcaagttgcgttcagccaagtggatgcctgggcagatccgccggcccgctccgtaaccaaggtgatctcgccgttcggaggcggcataggccgaggctaaggctgggaaatcggcgaagcgttcgggctggaaatgctcgggttcttgccatcgctcactgtcgtgatgcatgccccagacattgagaacgatacttgagccttgcgggatgagtttcccattgatgtggtcatcttgaaggatcgttagccattttccttttctggggttggttttgcttttttgctgacagagggatcagatgcaacaaacagaccttctgcgacggcatgagggacgcccaagggactgacgggacgccaccggtgggactctttaataatcatgttgatatacggcagcttggaccagtcagaccaagccggggaccggtcatggccgataatggagtcaatttctgcatgggccctgcaataccactgcattagttttgtgtctggccacattgggataaaggacctgatcggcatactttgcctgcacttccggatacttcgtcatggcctgaatgatggtcaatataagcgaggatgaggtatcggagcctccttccatcagaactcctcctaggaatcgtagttcattctcggagagtggagtctgtttcagtgcatctagaacccggtccataaacgagtctcgctggataccacgttgacggcgttccttcacctgatctagaacggtcttgtaaaggaactgcataagatcgcccacttcgatcgcccgattccgccagtttcccaacagccactggggtacgtagcgcagcagagcaaacgagtcaataggcggggtagcgcccagctcctgtaccaaggaccatttgtccattagatagaagagcttcttcatgtactcatcgtggacagttttggtgcgaataccgaagacaagcgagttggtgatactgttactgtaccgcttgggatgcagcatatggtcctccggcatggtcagataatcatgcagcatctgtttggcctcggcctcttgaaccttccagtggtcgcgttcacagcgaggctccatgaagtattggtggatggttttacgcaacatgcgccatctgtccccatactgcataaccagaagatgatcactctgcgtgatcaagtgtgataccagtgataccggtcggtgggaatatatgttgctctttttgtcaagcagtgtcttgaccagcttctgatcgttgatgacgatggtggtattgttatatcgtttcagcgtgaaaaagccgccgtattccttagcccaccgggagaacctatgtgaattacttagcatattgcccgatagatcgcggtgaaactgggtctctactgaaagtgcgcatcagacttcggtacctgcagttcatttccaaatagtggaacggttggagggcctgtgtagacgttagatacaaagtcaaattctcgtgttctcattgccgctatataccgttcgggagctctgagggtcgatgacctgcacgtaggagatatgtaacgaggaatagtgcgctggtactgctaaacagtatcgctaggaggtgcgttagtgagaactgtaggacgtccatagtcttgagagatggccagaaagtgctcctcgggacagagctattgtctatacttaaggttcttcatcaacgcggggaacggggatcctacctattctaatcgcagctcagctgcttgatggttttggatccctaaaggagaatcggagctgctcgtatagaactctaacggctgcatatgttgtctatgggtgcatccaattttatccgcataggtactatcgatgaggtgtttgatagatagtttggcgtcaagtgtatgctatggggttggacgatactaagagggggcattggtgccctcttagccctagagtactagggtcagtcctcctgccctgtccctctatgcttgataatgtacgtaggatgaggaattagtgggaagcggagcctaagtatattcttttgtatctatctatgacaggtaacaccacgtgaggcgctcgcctttgccgcgacgtctctttttactgtccacgatgtctttctgaacgtatattagactagaagattagcaagagcttatttcctacttgccgtacacaagaaagaaacaagaagtgaaaatgacggttgaattgaaatgaactgaggtacgcaaattagcaagtgttgcgcaggatatatctacttttccgcaccatcaactgcccgtcgctgcttccaagaactcgactgctccaatttgctctcaaggccagtggagtgaccgttggattcattcgccggcccagactgtaagccgttgaacagcccctgctcataggcaactgcgcccagggccaatggagtgggggacatatcctccgtccacgactcgaactctgcattttcaggcttagccttgggttccagctctgcctgctttgcccatggcttctcctcctcaaatgcggaatgcactagatgccgctggaagaaagagcccttcattttggcgacagcaaaatcccaatcggtagtatattcccggaagaacggcttataccccaagatcccgccaatccaccggccgacaatcacacaggtccagtatccgacctgccggcggaatggcacccatgcgggagcgggtgtgtaggcgtccccgccgtcttggatctacaaccatgtcagctgatgacaaagggaattgtacactgagaataggttattaccgcgagaaactggatccaatcgatccctccatcgtgcaacaatgcatcatgccaataaccgtaccagttttcgaagaagacccgatcgagctggtaatcgttccccgagtccgacgcactcaggtagatagtcatgctctcgggagaatctggatgaatgaagaaattatgtacactgcccgccttgaccgagatctcgccatcttccggagtaatgcggcggactaccccatccactgaaatcccgagcactccattttcgacgcggaagtactcggtttgaaattgatgaaaatgcgggggcggaccctttggtctatcagggctgttgatgagcttccgcaggttttccgggattgagccttcaatggtgtggcggtatgtctgacggaagagaaaacaacggcatggtggaggttcgaggaattcggtggtgagaagaccgccaaatctgcatgatgggactatgttagttaccaaagggcattttgttctataagcaacggcgtaggagccaagtatttacttgacaatagtagactggccggctgagtagtgatagggcacaaatggggccattgttatgcttgcaaaggttggccaactggtagatgtcagattttacaattgaatcacgaatatttggtctcttctcctaaatactacctagaaacaattctgtgtgtctgttgtcgccatctatatactttctatgcaatttaatcaccttctcacatgcagagtgccccaagggctggctgttgaagcatgttaaaatggcctgatcaaaacttggggctatctgtgcacaggagatgcaccttctcccctggagtatctgcacggagtttcgatgaaatgcctaaaaggcgagacacctcatcaagcacccattgaagaaatcattccgggcactcctttgggctaataaacatgcatcccgttcaggctcagcgctgacggaggcttggcctcggtgtgtcgaagaactctctgacaacacgctgaagatcgccattgccgctgcttacagacggaaggctaactcctggttcctgtcgaaacatccccgttatccgtcagtgagactgattcttgcgaaccttggctgcataatgacggaagcccgaacgatacatccgaatggacgaatggaagaattgactattgggtggagataaagatgtccccattcggaaactggacagcagcataccttctccgtacatactgtttgctttccttgtgaatggtctggatctcggtctcaccgggcgacgtgaaacggccgtagagggggatagggaaggatgcccagatattgtactggcgaacgaaacatacataagaacatcaataaccggcatctggtgggaatttttatgaacaagcttgaagttgctaaggggaccgagtctcggaagtgctactgaaagacatgaattctcgttcaccctctgcatacccctctgggggaacatccccagccccggttgatactcctgggactgaatacagtgaatatgtctgtgaccccaacccccgactatttgcatcgtgatctttcacgaacgtatcccggactgacactggataggaattttccaatgacgtggccgtagtgggaatggcctgccgcgtggcgggaggcaaccacaaccccgagcttctctggcaatcgctcctcagccaaaaaagtgcagtgagtgagatcccagagatgcgctgggagccttactatcgtcgtgacccacgcaatgcaaaagagctcaagaggacgacctcgtatggttatttcctcgatcgcctggaggactttgactgtcagttctttggcatttcccctaaggaggccgagcagatggatccacagcagcgagtctccctagaggtggcctcggaagcactggaggatgccggtattcctgccaagagcctgtctgggagcgacacagcagtcttctggggtgtaaactcagacgactactccaagctagtgctagaggatttgccgaatgtcgaggcctggatgggcattggcaccgcgtactgtggcgtgccaaatcgcatttcctatcatctcaatctgatgggacccagcaccgccgtggatgcggcgtgtgcgtcgtccctcgtcgccgtccaccatggagttcaagccattcggctgggcgaatcccaggtggctattgttggaggcgtcaatgctctctgtggaccaggcctgacccgggtcctcgacaaggccggggccatctcgtctgacggatcttgcaagtcctttgatgatgacgcccacgggtacgctagaggtgaaggcgccggcgccctcatcctcaaaagcctgcaccgtgcattgctcgaccatgataacgtcttggccgttatcaaaggaagcgcagtagcgcaggatggcaagacaaacggtatcatggcccctaatgcgaaagcccaacagttagctgcgcatactgctctcaatgttgcgggtgtcgaccctcgcaccgttcgctatgtggaagcccatgccacatctacgcccctgggtgacccgactgaaatatccgccatcgcagaggtctacggcaccgaccgccccgccaacgacccgtgttacatcgggtccatcaagccgaatattggtcacctggaagctggtgccggcgtcatgggcttcatcaaagcagtcctggctatccaaaaaggcgtcctgccaccccaggccaacttggtaaagctcaatagccgcatcgactgggacaatgccggcgtgaaggtcgtccaggaggccaccccttggccctcctcagatcccatccgtcgagcaggtgtgtgctcgtatgggtacggaggtaccgtttctcacgcagtcatcgaggagttcagcaatatcctgcggccagacccgttggatgatggcgcagtcaccggaccgggccttttgttattgtcgggtccacaggagaaacggttagctctgcaggctaaagctctgcgtgagtggatgactggcgagggaaaggatcacattctgaatgaaattctcacgactttggctacacgacgggatcaccatgactaccgagcagcgcttgtggttgaagaccgtcttgatgctactcaagtcctgcaatcactggccaatggagtcgataattcgctcacgacccagagccgagtatttggcgcagacatcagcaaggacgttgtctgggtgttttccggacatggtgcgcagtggccagacatgggaaagcaattaattcacaaccctgtattcttccgagccatccagccactcgatgggctgattcgagccgagattggcctgtctcccatagagctgctccgtacgggcgactttgagtcgtccgatcgggtccagatcctgacctatcttatgcaaatcggcctaagcgctatgcttcggagcaatggcatcactccacaggccgtgattggccactcagtgggcgaaattgcggccagtgttgtggcaggggctttatccgcagaagagggcgcgcttattgtgacccgcagagcgttgctataccgacaggtcatgggcaagggcggcatgattcttgtcaaccttcctagcgctgaggtcgaagagatcctgggtccccgagaggacctggtcgtggccatcgattcgtccccctcttcctgtgtggtggctggagacaagaagatagtggcagagacaggagaagtcttcaaggcgcggggtgtgaagacattcaccgttaagagcgacattgccttccatagtccaaccctggatggtctcatggatcctctgcgagacgcccttggacaggctctggccccaaccagtcccaccatcaagctgtattctaccgcactggtggaccctcgcggccaggacctgcgcgatgtggaatactgggccgggaacatggtcaaccgcgtgcgtcttacctcggcggttcaggcggctgttgaagacggatatcgcctcttccttgaagtctcgactcacccagtggtgtctcactccatcaacgagacgcttatggacgcaggaatggataatttcgcggtcatcccgactctccttcgtcacaagccaaccgagaagtacattttgcacagcattgcccagcttcactgccgcggcgcggaagtgaactggaagatgcagatgcctggacggtgggccaccggaatgcccaccacgacgtggatgcataagccaatctggcgcaaaatagagacggcccctctccatactggcctcacacatgatgtcgagaagcacacgctactgggacagcgcatccccgtaccgggcaccgacactgtggtctacactacccggctggacaacgaaacgaagcccttccccggcagtcatccattgcacggtacagagatcgttccggcagcgggtctgattaatactttcttgaagggtaccggcgggcagatgctccagaacgtggtgctccgcgttcccgttgccatcaacgcgccacggtcggtccagaccgtggtgcagcaggatcaggtcaagatagtttcccggttgatctcaagtgatccctcggtggcggatgatgatgcgtcttgggtcactcacaccgatgcacattgggatcggaaggttgtgggttccaaaggtcggatcgacctcgccgccatcaaagcacggctggacacgaaactaccagacaagttttcgattgactacttggacaaggtgggtgtctcagctatgggattcccttgggcggtaacagagcactaccgcaataccaagaaaatgctggcacgcgttgatgtcaatcccgctgtttcgggggatgcccctttaccctgggatccttcctcctgggccccgattctcgacgctgccacgtccgtcggctctaccatcttccaaacagctgcgctgcggatgccggcccagatcgagcgcgtggaaatcttcacctcggaggacccacccaaggtcggctggctcttcgtcgaggagtcctccgatgcagttcctacctctcacgttagcgtgctgagcgattcgggtgaggctgttgctaagtttacggccatgcgcttctccgaaattggtggcacccccggcgttagtggcagcatggagagtctcgtgcatcaaatcgcctggccaccggccaccccggccgaagagcccttatccatcaggacggtgattctagtctcgccagacgctaccacccggacccagtatgccgcgactctgccgaccaaggttcaatgcttccagttctccaccacacaggacctattcagcaacgctccatccctcccactccagaagggaaccgttgtggcctacatccccggtgaggtggcctcactggcagaggttcccgctgcatcggagtcattcacttggagcctgctcgagttgatcaaattcatcgtcaacggttcactgcctatcaaagtcttcaccctcactgcgaatgtgggcgatggccaaacagctaccgccctggcccaatccccattgttcggcctggcgcgaatcatcgccagtgaacatcccgatttgggatccctcatcgacattgaagagcccgttatacccttgtcggtgatgcgatacatccagggagccgaaatcatccgtatcagcgatggaatcgcccgcacctctcggttccgcagcctaccgcggaacaagctgcgccccgttagcgacggtcctcgtctgcttccccggcctgagggaacatacctgattaccggcggtctagggattctcggacttgaggtcgctgacttcctggtcgagaagggggccagacgtctgctactcatctcgcggcgtgcccttccacctcgccgaacctgggaccaggccagcacagatctccagcccaccatcaccaagatccgcctcctagagagtcgcggcgcctcggtccatgtcctccccctcgacatcaccaagccggatgcggcggagcagctgtcgacgacactagaccgcctcgccctccctgcggtgcagggtgttgtccatgctgccggtgtcctggataaccaactggtgctgcaaaccacgcctgacgccttcaatcaggttctcgcccccaagattgcgggcgcgttggccctccacgaagtcttcccccctaagagcgttgatttctttatcatgttttcgtcctgcggaaacctagtcgggtttaccggccaagcctcttatggcagcggcaacgccttcttggatacactggccacgcaccgggcgcgcctgggcgactcggccgtgtccttccaatggacgtcgtggcgtggcctgggcatgggtgccagcacggactttatcaacgcagagctggcatccaaaggaatcacagacgtgacgcgcgatgaggcctttgctgcctggcagcatctcgccaagtatgatatggaccacggggctgttttgcgaagtcgtgcctttgaggacggggagccagtccctgtgtctatccttaatgatattgcggttcggcgcgtgggcgcgctgtccggcaccacgcagagggctacaagttccaatggtagcgatgcggtgcctacgtcaggaccggagctgaaggcgtatctggatgagaagatccggggctgtgtggccaaggtattgcagatgacagccgaggatgtggattcgaaggcagccttggctgatctgggtgtggactcagtcatgacggtcactttgtgtcgccagctgcagcagacgctgaagatcacggtacccccgacattgacgtggagtcatccgactgtcagtcatttggtggtgtggtttgctgggaagattgtcaaatgattgacctccagattgactgggacagggatattggttgttgtttcccaaggttcttgtggtgtgctagggcgataagacgggtgcaagagtggcagagatggaataatagtagagagtgaaatgaaataaagctgggctctccagaggccatcatgacttcggcgcgtaattaggatgatatcttccacaacccaccagatatcaaactaggttgatgccataaaatgacatctagactgtttcacttcccacgcgcgttaatccaaaaacaacaaaccgttggcccacaagcatgcatggggcgagactgtttccctagaccaggggatcaccctggttttcacttatccaatagtttaaccacacgaagatgttggatccaagtcatgtgataagccccggcgctatattaccccgcatatcctagttgaagggagatatcgcggttctcctccctaggcatataaaaaagctagtcgaacctaatctagtgccctctctttccaagattacactcactaacgggtttagtcactgcgcctcctcaatcaacttcagcaatcaagtgttctcatctatggcgctcccactttacattcctcattgtattcacacacccgctggccggtatcacctcccaccatctgatcagccgctcagaatccaaatcgaaggtcccctaatcgctatacaaaggctcctaccacatatccattggcgtctggagtttggagaccgaacattcccacagccagcaggcccagagctagcacggttaacgtatcagactatatacggacgggatgtttgtccggaagtcccgggtgatctggtggtgcaggatgaatacttaggctggatgccggagaagcgtccggaggagtaagtcaatctcctagtggaagcaacgagctctgatggccctatggctaatcagttctctccttttaatttgagtaggctgattgactattatggtgtaacatttgaccatcttgtcccagctgatgatatcaaccccgaggtcttacagattaacattattgaaattgaggatgataatggtgtttatgcaaacacatggctttcatttgcagtagatccgactgagtttattgggaagaaggtactggcagtgccgagatgttgccagaagaggaagggaacacaggatcgctggcgagtgaatgcccttgtggaccagaggattcataggttggaacatttgaaggacgctaaagaatggaaaactctgacagaacagtagtatagccaaatggttttaaatatcgaattaaagcgaaaacaatcatagctacctaaagggtaagtgaaataataaagaatgtagcttctctatctatatacaataagtgaccggagaggaaacagaaacctaaatagttccctagatcgggttgtctaagtacaagcttaaatccgaaaatgctcctacacttctatacgcttggttaaagggaacctacaggctacggcagtgtatagccgccagtgcgccaaacgtattttgctagcagaacatttcatcaaattggtacacgtgtagtttattaaccatagaaattgggatcaagaatttttggcatttttggcattttgaaatgcacgaagccaacggctgctttctctcggggccggtgaaatcttttgttcttctacaatcgtaccaattctacccgccatctcgtcgttatcgctgtcgatctcaaacgagtctgggtctggaagacggtcttccaccgccgaaagggtcgagatcccacgatttgggagttcgcgaagaatggccggatcagatgaatcgagaggtggacatgccggtgcaaaaagatcggtatcatctgcatcttccactgtagggggaggtggtgcaccgaaacggacaggagtggtctgaacctcagttcgaataggcccaaaaacaggctcttcaaaaacagagtgatgcggtgttaatgtactagtgtcgggatcatccttccatgtagcagtatcaccaccgttatcagccatcaagccttcttttggcacaacatgaaccccccattcaccctgggtatcggtccgatccgaatggaaaagcactttggtaaacaaattgttataccgtagcatagtatctccggtagggggaggnggaggagggggagcatagaccgtattggttcgggatctttgctgctgcgggtttaaaatcacccgcccctgactgtcaacctggtctatgatttggcctggttggaaaggaagctgctgggaagcaggctgctgctggtgaaaaggaagctgttggtggactgcattggtagagccaccaccctttttcaagtgacaattccgggtaaaatggttgccgagagagttatgaattttacaccagatggcgtctttctcatacactggcttttgcttcttcttcttcttcttcttcttcttgtcggaagaaggcgaattgtcatttgtagatttatcgtcatccttcctaggagaattggaagctgctgagtccttcgctgatgacgttatatttgccgagtggttaaaagtaccggggtgatgtgcaatccggttcgaaccttctatcattgtaaagtcatgatagacacccaccatgaaatttggacccttcaggtcgggatctaggttctggatgaaggcctggcatcgagggttaccctgcactgccttcacgaaaaaattgagaaccatgtccgccgggatgacagggtttcgttgctgaatctcaaagagagcttctttgaaccggcgaacgaattcctggggattgtttttgtactggaggttgataagaacctcgaaacgtttaaaatttccctgccaggatgaagaaccgtactctgcacgaagaagcttgaatgcttcacgcgcattctctacgttttgaacgtgagaagcagggatggtatcaagcgtgctgaaaatgaggttatagcagcgggtattgatgagatcccacttgccaacgaggacctggtatcccttcagaagctccttgttcttctgtttttgctctttgacaagttctctaacaagggtgtcagagacaggagtatccgaaccagaagcaaaagctctatgctgagcaagctcacgaatagtctcaacggactcatcatagagttcgggagacactggcttctgcgcaattccctggatgatctcgatgttcttgttgttctctttcagggccatgtatagacgatgttgccattgtgcgaaattgggttccccctttagcttggggacgatctttgaaatgtcagattctttctgacggtcgaaatcgtagatggacgacatagtgacgcccaatatgtatgtatgaatgggataaacgaaggaaaaaaaaattaaaaaattgtagacggtcgagaagcaaaggtctcgaactgtcagggaggtctggatcaacgaacggccttttttggcggtcgtaaatgatacagaaacgatgcaaatagatggaatctagatgcagacaaatgccgagctccgattggacgaatcagaaatactcgggaagggtggggttgatggagaccggagaccgcgatctgattggaaaactctgtttatgggcccacaaacagaggcttggcgtgacgcagtacgccgaggtaaattggggatttaaggcttgcgatgagacagaggctttaaagacaggcgctcataagctgatagagcgagtctacagtggaaatgtaggatcctctggaaaaaggatagttgcgtggagaaaggaagaaactatctaggcatgagctagctaagtgcaagctgaagtcacgtgacttccaacagatctccgcaatggcaattgaagaacccatctggataatctgaatgtccccaggacctttgatgcaatatttaaaggagactgtatcatcctccccgaccaggctgagtttgccagacaggaactcgatgtctgtaaaaacaggagggatgtgtgagggaagttgatacgtcaggtgggcttggaactgatgccagtttgccttctgcggtaattccttcattgtagcgtagaccacctcatcgcttaggagaacattatgatcgtccagcagcaccagttttccttagtcgtcccgctcgtctttgacgtacaagaggaagcgtgcaatatcctcctatctcccacatggacgtctagtgacttgatataacaagcaagcgactacactactacccttgattggggggacatacgtacgtaaaatatgttgaggttacaacgactctgactactcggggagaatcaagaagggaaatgtgatctattcagtctaggaatctgaaagccttttatagaaggcataaaaagcaaacaaacaaacaagcagacaggcaggcaaaaagcgaagtctacctaggaataaggcacctatctaggatagcatgatctcaacggtatcttggttgagatatagatcctgcatgaatagaccatagccagaagaaaaaaaagaaaaagtcaatgtgccaaatctgacgacgaaaagaatgatactgatacctaatgtctgtgtctgcgcccatgacctgtgtgtccatgacctgtgtggccgtgatccgtctgtatgcccagcccatagcatgcgtcgccatggtctgcgtgatcatgatctgcatgatcatgatctgtgtggccatgacctgtgtgtctatgacgtctgtgcctatgacctgtatgcccgtggcctgcgtggtcatggtctgcgtggtcatggtctgcgtggtcatggtctgcgtggtcatggtctgtgtggccatggtctgtgtggccatgatctgtgtgtctatgacgtctgtgcctatggcctgtatgtccgtggcctgcgtggtcatgatctgtgtggccatgatctgtatgatcatgatctgtgtgcctatgacgtctatgtctatgacctatatgcccatggcctgtgtggtcatggtctgtgtggccatgacctgcgtgcccatgacctacatgcccatgacctgcatgcccatgacctgcatgcccatgacctgcatgcccatgaacagggcatgtatcatcgtcccccggtccataatcctcctcacgcctatgagtataacaattcatataatgatcgtactgaccttcttgcagcagtcccttgcgctcaagtctaagaatcagataacaagcccagagctggcagctctgtagtggaaccttctcggcctccgtctcgacagtggtgctctcgctggcgcggaaccgtccgagatagtgtgtggtctcgactgcatcactatcgaatcgcttgtcaggttcaatgagcaaggtacgattgcccatatagccggtgctgtgcagccgagtgcaacggtcagcatctggatacttcatagcgatcatccaatgaacgacggtattatttggcttgcaaatctgaaggtagagctcaagcttgtccggacgatcccgatgtccgccgtgctgggcacaggatactactcgacgtggcatggttgcgatattgaagatggctggagattactggatatttctggagattggtaattgtaggaaggtgtagatatagaagctgttcggagtgtgatgattgttgtgatgatggagtttatttcgaccgaggactcgatcattcttatagacatctcgagtccattgccttgtggtatacaacacgggccagtgaaagcgctttgttgagtctaagaacaaaccctttattatgtccaaatagacaaaggcaaagtctttgctgtagatgcttttacaaacactctttaaagtctctttcactagcctggaatagacggccagcacattttccttgttaaaaggattaaaaacaaaagattcatctgacatgaaaagaattaaatggacaatctatcaaattcgtgccaaagaaccacgtacagtcatgtcctttggctcgtcacctagacttgctccatagctaggttggtccccacattggagtatcacgctaatagactttgagccctgacagaaacaaacaagggaggatgtttgatggtgccgactcgcatgcgcttctttgtcttcaagcgcctcccaggcgtatggtatacaccacctctgtaatacctagttagctccacaggcatcaatggctggttttatagacctcttcatggagatacgatacaagtgataaatcaatatagaaagggcagtatgtattggagtggacgaagaggggaaagagagagagagagcaggcagactatctggttctatctaacatgtgatgtttgaggcatccagtacttctgcctttgctaggtatcctgtggcaaaggagccggagaaaaccccaagtttttgtggagcaagctctttcaacaagctccagatatctcgggtaatcctttgaacgcgtccctttgatcgcccaggcttttttcaaaacccggcccgaagtattgtatatcgggaagtaactcttcgcattctgagagctgttcctttacctgcagatacgtcatttcgccgccctttctttcctccttaaagccattgagagggtatctcttgcatttgaagaattccctggtatttctcccgcatataagctgcagctctctatggatgtttccaatgatcatttacatttctgatggaacacgggcatccctacatatttaccttccatcatcggagtcattggagtcgtccttggaggagaaggaggagtcgaagccgccatctgaatcgttaccgctcgtacagcttcaagcaggaggtgcagtggtggcgtagtgtcggggcaagagccatattctacttcgtctaaataaaatgtcagtaatgcgcatcaatagacatacatcacgtaaatgatacatgaatgaactcaatcaaaacgtatataaaatccgacatattagaagcccaacttctcgcgctagccacctgattaaacggaggatgaaaaactcaggagatcgtttaactgggctatcaaggtcactcgtggtcccaaaagtcgagcttggagactggtgggacccccgtccatcgtcttcctaagacagcggtgtgaagggaggtaacaagggatttgaaagaacaagttggcaaattaagttccctgtctggtcattgtcatggctggttttgaagtcagaacattggaggatgctgataagaatgggcagtgaggcatcatgctggagatatatagagccgtagagatcagattcagtatatcgaaatgatgtttgcctgcgttttgcaaaaggaaaacgaatttctttgcgtcacgaggctctatgcagggctatctatgtacggagtatacatagtcccatcagggctggttaacaatccaagacccacaacatttcagcccccaatatccaagtcccgggaaccaactgggggccccgagatagtcaggtaagcacacttatcctcatctcctcatctactccgtacctcttatcttaatcctacattccagccgtatcaaccaatctatcccatccaagatggcatcaggtctaatcctaaacccccacctcctcttccaaaccctcccattagcaacaagcaccgcaaccctcgcgcacgcgctactagaactgacaacaaacaccgccttcctcatcccctccctgcaaccgacctcggacaaagtcctgccgaaatggttctcccacgtcttcaaccgcgcagtatggacagtcctcggtctaaacctgggcacgataacctcagctgccgggacactcctcttgaatcgctattacccacagaagccgctgcagacgacggcattttactgggtcggcctggctggcgcggtcggacatttggtttttgtgccgtttgtcgccgggcccgttaagaggattgtggatgatgttgctgttaaagaggatcttggggagagtggggttggcgcgtcagttgatatgcgccgttgggtgggggttcatcgggttagaatggttgttgccgatttttcggcttgggttgcttttgtgggggcggttttgacgctgtgaatttgatattggtattgatattggtagtataattgggttggtgttggtgatgaatatatgtacatatgcgtatgttatgccactggcgaacatctgacgactgattcgcactgggcatggactttgacaaacctgttatgaggcctttaagcctttcgcgagacgaccttgatcagagaatactaacgttaccgttgtcaatctgtataatttattatttcactacttaaaagaagaaattgtgaataaaaaataaaaataaataaaaataaaaatcaagcaaataagcaatcagcgaacgacttagcggaacgaccagtacaaagagaaccctcaacgcaaataacagctagcgaagcatcctcacgtagcaaaaattggggcccctagaagtatgataaggctatagcccttagggaccgttgaaagctttgtaggaatacatgtatgctcctaatataaccaacgtgcttaaatgcttagagtacccaccactagcatatcccttatcaggtatatgatcttcattttgcttttttttaaactagagtgttccttaggaaactctagttatattacctctactaaaagaaagggccttgggattgaagatttcagccagagacagacccggcacgtatacccagaagagaggagatttgctattccaatcccacattgaatatattggagaagcccagatacgtttacgattgaaagagtctagcgctttcaccgatttgagggatagttactgactcgagtaatacgcagagttttgcgctcgcaaccttattgttccgggctagtatatgttgtgtctatggagcttagtgtgcggtcaaagtctttcgtttccttcgccatcattgagaagggtgtctgagtgtcgtgctagaccctgtgaatacgagtgccgttcagtctcgtccttctaaaaggtttaagtccctgagaccaggcccaaacatgtgttttaggccaatgatacctgtttaccgggtttagaatttgccaattttgccaaccatgcagggaaaaaattctgttcttattggaaattaggttggcccccaggcagctttcccgctaagttcgtgtttagagtggatagtgggccagctgtcgtattttgagattggccttgtcgatccttttcgatcggagcgttgatccattaaagatgctaattctaagtattccccttggaaacgtttagtttattgaaaatagccgtaaatcccttcaatccgtgataggtaccaggttgggaattgtataggtgatctttgcgaggggatcctgaccatcatgcttgtagacgttgaaatatgtgtcagggtttttatctgaatacgagatggacggccgaatagggggatctgctgctttttagcctcaagccccatctggtgtcaacggtaataggctcaccatatttacgccctcgttctaaatttctatgtatccatcacaaccgagtcacgatgaggctgagtgaccccaggcaaaaatgccttaagaaataccggaccccgtctgcgctattctaactcgtcattcctttacgtccactccttttgttcatcagaaaattcgtcgccgagggaccctcgctctcaatcatgcactcaactccgggagctccacggccatcgcggctcaccaaatggtggcccatcggcttcttcattggcgccattgtctgcttcatcatcggcggtgctctcgtgggcacatggacctcccacgcgtatgacgactgctcttacagcagctcgtacgacagctccagctcctactacagctcctactattccgactacgactactcttgcgccactaccaacatgggcgagttctatggcgctgttgctatgtttgtcattggcggcatcctcaagctcgttgcttggatcctgctcatcatcttctgcgtcaagcgcagccgcaaagtcagccacaccgtcacatacgtgaacgcccctgctgtccaggaaacacagcccttacagacctacgccgcgcctcaaccctatgccccagtgcctcagcctgccccgtaccctcattcccccgcctcgatctctggtcaccctgaggtcatgggctcatctgtctctggtacgcctcccccgaatgaggccaatgcaacggcaggtgctttcaagtactgtacccagtgcggaaccgccgtgtctggccgattctgcgctcaatgcggtacccagagctgaggtctgattcaatcactttcataatacaattcgacttttgtcataatgctgcatgttggcgcatggggatggtggagcaggttgttggtcaaaattgcatcgaggatgagatgccgtcttggagactttgaactatgttggttttactttatctttttatttttgtgatacaccgggatgcgttacaccctgtgttatcccctatatttctattttacccttcttcccctctccctggttgggggtttctagtctagcacgacattcattattattcctgccaacatttgaacacaatataccaaaagtccaatcatcaacccaagtcaaatgttgctggcaggctttgctttccagcttagctggcgagatgctcgtactcattaatcaactatagtaactgatccagcacgacttgacatatgtcttgtatagtcctttcctgcggattcaaaaaagagctctgacaggaggtctgcaatgaagaggcaaaattatgctgcatgaacagatatataaatatgtttattgctatgaactgcgcgacttggcatttgccccgggccccgggcccgcccgggcggatatctgtgcttattaacccgtaggtaaccccggggccctacctaagtatgcctgaagggtctgagaaacatcacttaacctccttccacctccatctcgaaatttacttggcgaccttcgacatttttcagggccctaaccatggaccgccctatagtagccgtagtcactggctccgtaagtctcccctctactaccgcaggccgccattgaccatgattacagaaccgcggaatagggcgtgccatctgtgctgcgctcgctcaacagttcccgggtcccttggttctttatacagcctctcgcgccgggacttcgtttgatctgactggcctggctatttccccagccgtgaaactttaccctgctcggctgtccctcaccgaccaggccagtatcaccgccctcacaacgatggtcagcaaagagcaccagggctgcgacattctcatcaacaatgccggactctactatttccaggagaacatcactgctgcacaacgtcaggaaactcttgatgtgaactatcgcggcaccctcaatgtaggtcaccgaatcctcttctcatttgatcaactaacgaccgccaggtctgtcaagcgttcttaccaatcatgcggaacaacggccgcatcgtgaacgtctcgtctcaatctggacaactcaaatactttgatcctagcttgcagaagcgattcctggaccctgatctcaccctcaccgagctagatgctctggtcaacgagtacagcgtacgtgatttcgaccttcattgctctctttctcactaaccacccattctagcgctcagcagatcagcacactgcgaccgcatcgggctggccccccttagcctactttaccagcaaggctgccctgaacgccgcaacgcggattttggcccacaaaaaccctcatctactgattaattgctgttgtcctggatgggtggtcacgtcgctgggtgcgcaggcgggccagccgcccaagtctattggtaagtgcggggctttctcctgaggtctcccgggcgtgtcgcttacactttccttagaggagggagcgagaattccagtgcgactggcaattgacgatattgggaagattagtgggcggtactgggcgaatgattcggtggctagtacgggcgatgggagagttcagaatttctagtattctctcgttactagccagcctacgcgtgggcgactccagtaaaggaagtccaattatgagcttcaacgtttattctccaattgacaagtctcatagaaactatttagtcctttatcattccaattccccttccagaacagcagaccttcgctatttcgatcccaaaattataaattagtcgccttaggaaccacgatgcagcatagaatgagaaacaacacatcataccacaaagatgaaaaaagccttccccgaaaaagacttgggggcaatgcagacatctcacgcaccgcccgcagcggccgagacgttgcactttttatgctgtaaacaccactaagtaaaaggacccaaattccagcaatccacgagacttaccgacataaagatcgagcataccaagctcgcagcagcggcgacatacacgcagataaagctttccaaggaaaagtcagtatatcatccaccagaaaaacacacaacgaacacttacatgttgtgccatgcggacacgatgatgaccagcgcctgatcacgcagcttctcagacagcgaggagagcagctgaccactcgttccggagacaatctgcctgacttgcgattgcggatactccgggagcagggcgaacaggtcgttggatgcaaggttgacgaatatggccccgctgatagataggcctagcgtcatgccacttagttgggctatccagttgggttagctgggaatatgctagagaagcaaatcaacgaaccgagtagcataagagtcagtccattgggtgcctcggccgggaccacgacagcctggatgacgccaaatgcggcctgggtgtaggcgccagctccaagtcccagcacaatctcaagtccatagatcacgcctgaatgggtgtcgacatggacaatggtagctgttggtcggcggtattagcacttggttgtttaaaaaacgtattccgcgacttacacatcaaaacagccgggatcaaggcaattatactaccgcccacgtaccagggcttgtagtagccgacatgggacatcatgacaccgctaaggggaatggtagtaattagcaggaagatgaacgggagtagacggacggcagattgtatcgcattgtctccttgggtgaactggaaataaatagggacgtagtagacactgacataggaaacagcgcctactgccgcacaagagataaagagtaagacgggctccttctgagtgaagaggtggattggcaaaatgcgtctatcggtcgaggtggcaatgttgaaaccctgttggagaccgaagataatccacagaacgccggaaacaacgaacagcgcgaccgtctgcccgctgtcccatgggtaaagagtcccaccgaagttgatgcccattaccagagtagtaaatgctccaacactgagtatggtgcctacccagtccaaggtggccagtttctgccatcgcgacgttccaggtagtgggtcgttagatgggatgacgaataaataggttggcagcaagatggcgccgaacagcaggttgatgtagaatgcccagcgccaagtatatagctcaaaggcgccgccgacaacaggacccaggaccgttccgagaccccagaccaagccactaggatgaaccgtcagtgtacgattcgtcgagtttcggaaaaagcaggctcacctcaagcttaaccattttgggcgttcttggctggaggtgttcatagaaattagagcaagcaggccaaaatacatcccattaccgcctgctccagcaaagactcgcccgatgatctcggcgtccatcgtgggcgccccgccacagagtgcagaggctgccataaacacgatggtggatacaatgaacacccacttggcatcaaaaagtgtgtagattttaccaaatggcaggatcatcgtcattcccccgatcataaacctatacagtggagtttgtcagccctcgacatctctccaatgctcacacctctcatccacgtacccgaccgatagccatggcaaatcttcgaccgcgttgaaatcgttgacaattttctgttgggaggagacggacaatattggtaagtatatacctctcgtaaagagttgaaatggagaggtggggggcgtaccggagcgatgttggcaacaattgtattgtcgagcgagtagacgaaaatggccgtcagggtactgaacagaaacaaaaaccactaacacagtcattgatctcgttagcccgaccttgggaagcaaccttggagccaaacttaccttgaagccggtgatttgccgcttttcctgtgaatccagcgatgaatcaccctgggtgagcttttctgcatcctgaagtgactcgggccgagaggaggtagatgcttcagccatcagaatggattaaagtaaaaaaacctgtaggaacaaacattaatgcgatacaaccgtaaacggtaggtatataactccgtatatgaaattcccggaacatttcaggggaagaatttgtcaccccgggccaatttctttccgcaataaaggatacactatagcacctcggcaccttttatcagtccaagatccagcattccatcaaaagttgccgactgtacgtcggtccgcttcgtgattcgtcgattgcctcgtcccttgccgaggcggagacttttatagatcttcggcagatctacactccggggccgatccgcagtggagaaaccttgaaaagtctccgcctttatgacctaagagccctaattcctctgggtctacgtactattcacacctcacagaactactttgtctctactggtgacaagcagtttgatttttccgtattaaattctgaccgctttgtacacagtcaatttaccattacctcatctacgaattccacctagccctggagactagcagcgattactaagttcctgcatggcagaaattgctgtaaatttggctcttctctcacttcgcacctgctccattccttgtatctcagttcaaattgactacccataacagatgaagctcaaggcccacaaaaaagggcactccagagtctgtaccttccctcttcgtttctttaacacatccttttcttcacacgtcaaccgccattttttgcgaggaaaaatggcgtcgctaaacgctgatggctctccaggcccggatatctctcttcctgggccgtttttcgtaccgtcccttcctcatcttctattatgagcaaacttccagataggtacgtcgttcaaccacttttcccgtttccagttgctctacagcggtgccaaaactcatgtcgagtctcctcagtcgaagtcaaaaaactagtggcttgtggttctcggtttggcccaatcagctatacgaaaactcgatgaagatcacagttatttcgaggcgcgcttatctcatttatcgtaagcacgcgaactataagtaggaggaaacgcaacggcggcgtgaccgtgacgaggaataccgggcatttatggctgactttggaaaggtataaggttcttattcccttaataaagctgttgctaattaagattccagcgggcatacgatctccaaaggcgcccagcgttgccgacgcggacaagacatcattgaagtctccccgcatgtttcccagacatccttttacacgtctcaaccacatcagttacacctcactttcgcctaatatccagcataatttgtaacccattgatttaaaattcacccctcttacaaccccccatccttctctcaacaccatccaaccaccctcctcaaacctgactttattactcgactcccacgcactcaatccaaacttcccctccttaccaacccaggcaagatgaccaaaacaaaacgcaagatggacacacctccccaaccacctcaacagcaagcccgagtatcggtttgcataggaaggacatgccgggctgatcaagatagtccctataggggccggttatgttacaagattgaatattatctcatgacgaccgaagtacacgactgttgtcaggactggtgccgtctgtcggagatcagactacaggatattggtgacttgaccagtgattaacaagcgcaacttaatatccgcgttggcacgggtaagatctacacgcttctctttattgactccttatgtgctaagctcctacagcgcttgaattcgacggaggtccgtatcactcctcgaagaaaaaacctgatctctttatgcgctcgagtcgcgaccgtctgccgtccttggttattgaatcaggttggagcgagtcgtggggtgcattacagagtgacatgaatcttctactggtcggaggtaacggaaagaaagatagaggtaacggcactgccagaagctgaagataccgtaaccagctgtcgagaaccgcttggagaatccctctagacaggatgattttttatgtcatacagactgagcctgtgttttgtcagtttgctagtcctttattattgcaggcctttataaaggccctagtttccataccaagagtttcttcctcctcctccatatccctagtagcatatagccttaagagaccctagtggttgaaaacccatagatgcattattacattatcgttagacacttagagcttcctgaattgccgggccaccctgcttcccaattttcacgaacggaataagaaagaccgaaatcccagtcgccaccgcggcgaagcgaaaggtgaagagataaggaacgagatcagtgattgtggcgttcgctttttccttgaaagaaatgtatattgcagttgaaatccccagtgatagattaccacatagcctggtaatagtattgaatatcccacccgcaagcgactgctgctccggcagcgagttcataacgtacatctgtatagctgttagcatctccaagtctcatttatttaaaaggctacggccgcatggagtagccaccatgcgctgcgggccggtacaaactcacatttgttacgttatactgtatatccatcccagtgaccattaatatcaggcttgggaagatatacgcccagtacgccgcctcttctctcataaaactcaggatgaggaaggctaccgtgtacgccacagtgccgactcccattagggcctgattgcttactttgtggagaacaaaagcacagacaacattgaccgctatgccgccaatgaccatgggtagcagttcaagggcgatctttatagcagagtctttgcggacattctggagcaatagggagagccaaaatgaagtagcggagaaccccatctcccctaagcattgcacagtgaccacctgcgcgtaatgtgttccgtcagcgaattgagttgacactattccactaaaaagaccgctaaaaagaccgctaaaaagaccgctaaaaagaccactaaaaagaatgttatacgtaccgcggaaaatgttcggttctgacatataacgagcggcattagcgggaattgcgctcttgactcccaccatacgaagcaaacaagcagggtggacccaacacaaagcagtgcgattacatatcccgtaccccagccatgtggagcattacctgcaaggctccgaatagtcagcaccagtattctacgtggagtgaaactagtcatactcacgacaaagaagcagtcagtgacgcaaacccgacaatgatcaataccgtccctatgacatcgaactgtctcagggactcgatagtcaggggtacattattgccctcgtccggcgggaaagcccacgcgcccactatagtgaagatagcatagaggacggcaagggcgcggaacgacgtctgccacgtggaaatatttgccgcaatgccagatataaccatacctcctacgtaccccagtggattcccggcactgaagcatgcaaaggcgcaatttttgcggacagaagaagtctcatacacagcgccaagtttgccgattgcaggtggaaccacgctggcggagaatagcccgatgacacccgagaagacatttagctagatcggggaggaggcgagtcttagatcctttggtcctcttcttcagttgcacggagagcgatggccagagccaacttggcaaaatattggacgtcttccatgtcagtgatgagatatgggccatatcggcgaacttcaacaaactcgtcttgcttcacaaggcgttttcccggatcaccctgcatatattgtctatacccgtccttgtaagaggcgttgagcaggtacatctcagctccattctgggcaaaaagcgtcaccctaatagttaagtcaacatagaaactcaaatacagcgacattaatccatagactcacctgtccttcgaaaggctcttcttgggatgctcattcaatagggctgcaaccatttccatggtctcctgccaagagacgttcggttcatgttgttcgcggtatagagctttcgcttcaataattgcttgggctcgaaaggttgacctcgactctaggaagccgtctacctggcaagacaagctaaagacatccgatctgagtataccgatttccttgtccctcttgacatccctgaagtcgaaggtcaatttcactcgagccggattccagtcactatccacatcacggtgctttgcgcagactgcttgcaagaagttgataagtgaagcattcacaagctcttcattcttatcataggccctctcatttttcgttggccctcgatttagaaactgggacagccgttgttgctgctcgtaagggatccaaaaagtcccaagattagcggtgttctttggcgggatccctttgtcaattgcgtctagatagttgttgaattcttggacgccttccaggtactcatcagctttgcgaaactgcgcatctattcctaacttcgtttgaacattccttctgtcggaagaggggacctccggccagattgttctcagtagcagaaattcctcctcaactaccttagagcctgacctgaacgggcctctggtgtggacgctcgtcctcaaattgacccctgctttctgggctgcttttttccattgcttgatattcatggggatctcgattggctgatttgggggcattttcgaaaagttggatgcgatgttggtgctgtgggattgacagttgctggttggcgaaaagagagcttgtctggggagaaatgaggggagaaggagcgggtcaatggaaagaaatcctaggtgtttgctaggtgtttccaggcttgttgtcattgctactagtattacacatatcaaatcaaagctacttatctcagcaagaacatcccgaggtccctccaggcttatctatgagcttcacttcatctcacaacgtcaggcacgaggttaccttccccttcccaaaagggaagggccttgaaagccctctccctacattctgcaaatcaacagatgcgtctaagatgactaaagcctccatccacaaactgggcctgagagacctacctaggtaggtacctaggtaagctctctaggattaatcagcacacttatctggctacctgtgggttgttactagtgaggcagttgaaacgatgagatctggaggagttggacttgggcacaaacattaccaggttgggatgataaatctcccacgcttctggatctttccttctttcctcttcctagcttcgatgctctcgtcggtaggcaccgaatgaaccagttcttttcgatcggcccgtaacccgggtgcggcttttctctcccccgaacatagttagttgcataaatacgtatagcacgcttcgtattagctggtgcatagaagaccatagcatacttgcatataggcacatcatcagttgcatacagattcttgagctggaaacatgctgatagttatccgtcatcctcctttatggaacaaaatgcttggaattagcctcaaagattgctcgcgaggcctccgcttctataatggtcgattgcttaagagcatacccgccgtagagccttacgaagtatagtccttccttaggccctactcctggtatttggtacaatacactagaacgaggtacttgcctaggtataggaacactaggcgatagctcgagctagatacgttgattatacggtgttctgaatattgcttgaagaatgatgggccccctagtagagccggcttttcattttaagcgttatagagatcgcctacgattgattaccttgcggctaattttcgcgcagtcgcgaatattgtaatcgtacgcttagactttagaacattaacgctcgcttacgtacggatgtagcgtaattgaggacttattaagagggcgctttaagtccgtaatattgcgtaataggatgaacgtttctttgtattgccagggaaacctttcttatctagcagccaaatatcatttttgtggaaaaagattttctttgtttgatgcgaagagcgaggcttgatgctgaacgcgaggagatggcgactgctcatcaactagaacaggctcgatttctggaccatctcggggtttgcaattgttgtagcgaacgaaaagctttatcttttcatcactgtctacaaaatcgtagatcggcgaggatctgacaagcaaggtaccggagttatcgaatttagcctgtaggagacggccgtgccttggcccaaagagcgagatgacgagtactgggaagagtgaggtattctcgaattctggctgttcgagacggcagtagaggacgtttgcaataggcgctaactcgccatggagtagttcattttctttagcctttgcaccagtgagagtcaaaagtttgatgtgagggcgagtggtcttcggatcctcgaaatcgtcaagccattggcaagtagaataggcgttccatctcggaagatcctgaggctttgaatgtccaagcttaaaaccgcgtaacattcctgttggagtctcgtggaaagagttctcggccctaatagcctatgttagcgacttattaattaagtatagaacgacctccggagactcacttgatactatcccaatgcgaaaggtcctttattgaggattccgatctcccactcttcctttcggaatttgactcgaagaccttaagatagaatagaatttgaccagctctctcccacatcaggcaactctctgaaaccccgcctggggggtcattaaaagtgcccttgaagtcggtgatgtagcgatgctcgtccttcgagagttcttttttgtcgattttgtatgtttcaagctcttcctgggtgagtggcgggaagagacaagcttcggaatcggtgaatttgtgatcctccggatcgacggattgaacggacactcggatttgagcgagctcagtgtgcgtgtaggcaggcttggaccgagactggagctcttggatgatggatcgcgctgcttgcttgtacttgtctcttaggcgagcacgtccctgcgagtcaaccagggaagaagccatggtgaacaataaggaagaaagggtgatattgttgaggcataaagacagaaagatgactttgtgggtggacttgagagctggagacgaagatgtgtggataagacccgtggactgatgaaagaggtaggtaatcgtgccaagcccaccaacactaacaacccgtgtttggcacgattacaactagcatgtgaaggcccacccgggcgggaccctgttattagtcacgtgatcctggctcgccgtacaatacccgaccgaaaagcatcaccaaacaaaacagagaaaagatgcagttggatcaccaaacagccatgcgcagggaggcgctaactggaacgggcacgctaagctattttgcgtaattcaccgtcacccgagtatacggagtacgcctgtccgacgagctcgtatatcgccgccaaaaatttgtctaataagcaacttctggaacgttacccgctctactttgacagtaacgtccagctgcgcgcttcgcggacaccccaagatcccgccccgctggtttgggctctcggggtcccttcgtggtcgtcacaaaaacggtggcccttaccggcgagcgctttgccgacctggctgcgagctggcttgacaagacggccgtcttataaaaacatgaaggtaacaccaagtgcctttaccgtcggccacatcgtcgctagcaaggatttcgtggcgcagccgcgccaaacaacttgccattcagcttgacaactaccgccggggtgcacacccctggtcacttgactttgacgcggatacactggcccgcgttgatatcagtatcatactgacccctgcacttgcagtgagaccggccctctccaaacttcgagtccgcagcaggccacggaaaccgagactttcgaagcttctgagaccgacactgataaagagcgagagctcatcaaggccattgaagtagtgagaggactgggtatactgatcatctcggtatagacatcccgtacaaattgtaggacttcgatatatgcatcggtaacgtcttcattcataaatgcaaagccaacaataaaggttttcctggttctagacatcccggcgatatctatcattggcatcctgaagatattagtcttttacgtacctcggcatggtgacatctcggtgttaatcaattagttcaattgcgaaatcgaaccaaagcggtgttgatcggtagttgaatgcgtcgggtctgtggtgaaatacatgtagctttatcaatctcgtcaaacgagaagaagtgggatggatattgaagctatcatgatacatgtatgctgagatggtatattgataagaaaatgaaacgctttctccgctgggaaatcaagacgccaatgcaaatgacacgatataaacaaacaacacctgaagatatatcgcgagatgatacaaatacaagcccaactctacaaactaaagatcccactcctcttcttcccatgcggataaacaatcagagcggagataaacagcccaacagaaataccaatagctgtctggatcataccatatcccagcgaggtaagcgagctattagaggtcgcattggtgctagagacattacccgacgcgacagcctcagcatactccaagccggagataatcgacccaccagacgcaagaccagacgggacaagtgtaaagataccagggataatagccgcagcggcatgaccatgccacaaccgactatacaaattagccagaaggccgatggtgaacgcgcccacggtattagcaacctgattcgagccgagcttcttcgtgctaaagtaattcgtgacgtatccacaaacacccatgaagatagtcacaggcaactgtttcggcttggactgattgatcagcgcagcgaagagacagaacagcgcgacgaacgggaaatgctggatatattcatttccccagacctccggcagattcgaacacgtcgattcccgcgtagcatttcggtccatcagtccgtagactgtcgtaccgacggtaacgccgtacccgaggaagagcgagtagataatggtgaagacgagcctgatcgagccggcattcatctggtgcgactgcagctcgagactactgcttagcacggcgaagcctggtaggatcattgcgatggaggactgcgccatggccgagaagcagaagacgcgctcgccgttgtgctggatgctgccgaacgcgcgcgcgatgaaggaggtgaggacggcggcggtgacttccagtacgtttgagtatgttgcggagtttggcgcgacgacgtgctgcatgaagcctactagacagccgaggatgaagattatagggaggtcgatgggacgggcgctgaaggcgtatgggccgacggcgacgctggcgcagccggttaggaagatcacgagccagcggttgtagcggggtttgcgctgcatgacctcgtctaggtcgtgggttgcttgttcgacgccgatgacgtcgtggactacgtttttgtagatgttgtgtgtctctgcgagacgggagagatccagtccctggactacgcggatgatcttgacctcggcggtgcgggttaacgggtcgtcaaaggagaggaacatacatcccgggatgtacatgaattgggctttgatgtccaggacgttggaggtcatcatcatgtactcttcgaggcggtgggttggggcgccgtatttcattagagcgcggcacagctgcatgatgtactgttgacgggcgagtatggctgcaatgtggacggtgagcttgatgtttttcttgctcttgcgcttttgcttctttcgctctttgggattcgcgggtgggggacccgtggctccgggaaccccgatccggcccagatccatggatgcattgattaaggaggacgtatagctgtgggttggtttgctggggtggttgccattgttgtaccatttcaacttctctttctttccacccggtgtcactgtgccggatgctggaacgctttctatgtctgggtctgtttctgaagccgtggagacgacactcatccggctcgcagcttggaggttgttggcatatacacggagcagttgtgacagaagtcctccgggtggaccaccgggtgttgccgtcccatctggggttcctggggttgtcgaacccgaacgtggttcttcgatacgtggacgccgtggctccgcctgtgaccccattcgttccaccaagagtcgagcttgtgaatcatagtctgttcctgggagccgagcttcttcatcgactgcccggcgagcctcgaatcctcggatatcatctgttgctccatagtactctggtagcatcggcgcatccaagccgtcggcatctctttcgtggggtcgtccgagcttctcggctattgtgccagcgcgattccgaatccgccggcttgctgtccgccatctttgggaagtagagatgctagggttccggctgtcctcgtctaggtggatgttctctgtgttggtatcgagattgtgctccttgtcttcggttcggtctccctcgggaatgtccgcagagggcgaggtcgacggaaacttttcctgcacgtccgacatgacgctgcacggcgaagttggatccctcggggagttggcagaagtgtgtgacttgtgtcctttctagatgggaatggtagagtaatcttctgtcggcaaagccaatgcaacggtctagtggcagccccacaaacggtcggacttcagaaagaagaaagaaagtgaaattgggggaagtgggtttgtccgaaatgaggagaacctggttcaaggccccacgtaatgcaattgaagttctggccatacgcgttcaattggaatatcatctgttcctggcctgatccgattgggggaacagagcatatcccggagatccatgaatatctgataggctgataggctgatcttatttctgacatcagatgacatgaaagaaaacaagcttcttagctactaagctgcactaactgtgttgatttctatacatagttcttatatgaacatacctacctaggtaggtacatatcacacataatacatagcagtgctaacaacctaaacacagttctttaaaagtctcaaatgtctccgtttcctaaaaaaagccggcatttgccttggcctggactgcgcctccatcggcataatgtgggcccacttgaagaatcgagaatgttcatgttgggattctaattgggcctatatatgtagagagggtgaacacatattttattaaggacattctaactataattaaagggctagatggataacagtccttgtatgttcggtagtaaatgtggtatatccgttatatccttataatgtatgtacgtaggtaaataaggtaaataactaaataaccttggattgtctgaaataattactttaatcttatttgtattctacgtagatcaggcatataggattctatagttccttgtttattcctactgtctcgtactcctaattggtgaccctacatcatcatcatcatcatcatcgtcattatcatcatcatcatcaccactatcatgaccgaccatcatcaccctctctaactatttctatatctctacaatccacaatctacaaaataaatcaatccctatataaacatcacccacaaacctatcatcaaaacttgatgccaaactccaaatccaagtccaaccccctcacaacccccgcaacaccaatagccctccaaccccaccacctcctctccccacccgccgacctcctaaccaacaccgcaacaaccctaacaataaccccaacccaagataccaaatccccctcacaaaccttcaccatccaccgcatccgcgcacacgaatcccccgatagcccagaccgcaccgtccccctctacaccgtacacgggaaaccatggccgaacacaagccgcgtactctgcgacacagagggcataccggtcctcgtactacgacgggtctggttatcgcggaaatgggtggttcggcggcccgaccaacagggggaattgttagttgcttcaatgccgtggggtgatgggccggggtctataattggggttgggggtgggtttagactcgaagttcggtttgtgaatgcgcttgcggctatgtcgcggtcggttgtaggagagggagccgggactgtatctggttctgtggatgagccgccgccttatagtgctgtttctggtgttggagttggtcgtgagggggataggaatacggatacacatgcagatgcagatgcggggttgacgcagaggaatgagaaagagatacattcccatcccgctggaagtctaataacatcaccatgcgccaggcatacgtgccatccttgttccccctccctcctcccatcctacgactctgttcgtcgagactcgcctaattccctgcgcgatctgctcgatgccgtcgagctgccgcaggagccggtgccggctgtcttgtttcgttcatctacgtctacttcctcgtcgcagaatgccagtgccagtaccagtaccagtaccagtactagttctgatcctggaataggatcaggacgtaccaatgcagaagcctcggggtcgaaggttgagttgagagtgatgcagctagctgcatcgggtacgggtgtcatgatgggtaaccagaagatcatgcacatcacgcgacacaatgcgatggactacagtaaatccaaagcgaggttgaggccgagatgggaggttgaggttgctgagggtgttgatttgctgctggtaagtttttcttgtttcaataaagtgaagcgggcgacatcatttttcatgcgtcggaatattagaaaggatatactgacaacccgtgtaggcagtgaatatcgtgctgattatgtccgagtcgtctcagaacagatggaggtaaacagtgtgtaagggagttgattggtgtaatataatgggatttgcatgataggactagactgccagttccaatgggtaagaattcttgattctaaaggatcatctcgccctctctctcttctctcactcgtcaaacttttttttaaccatacattcgtcaagggaacagatcttcttttgttccgtattaagtatttcgttgacctgggaagtctttctcgtcaaaacaaaaacaaaaacaatgtcaaaacggtcaaaccgagcacattcgcaacaggaatgtctaactccaaagcttacgactgaagcttagccaggcgcttggtcatgaagtcaaagaaggagaactggctgggctggttgccgtactcgtacacgaagcggctggccaggtagctgccgaagatggcacggaggtagttctcagggacctaagagtaattagcgagaattccaaaaacaatattaaagagggaaggggaggcatacacgttccaagatggtctccagaccaatcttgtccaacagacgacggggcagagcgtcgccaagcacagagcgacggagcgcaacattgtcccagagctcggtcatctggagttcctcgtcaagcttggtgatggccaagctgagacggtcactgagaacactgcgcagcacaccagtctgctcgtgttcgcgccagatggcctcgaactcgagagcggcgttcgcctggatgacctcctgcacctcacggacgtaggccttgtagaattcggggacactgccatcctcgcggatgcacatgtgctcgacgaactcgtcatcgttgaaagacagcgaggccaagacttccagggaggaagatgtcacaccacccttgttggcggaggcatccttgtacaggatgcagccggccttctcgaggcgcagcttggcgtcctgggtgatgaacaggttggcaccttcgacgatgtagggaatgatagccttgttgtcccggaggagcttgccgacggaggccaggtcgatggactcggggcggccaccgcagggcacgaacacatcgaacttctcctgcgagcgcaggtggtatgtgttacggaagaccatgccgttgtggacaacctcgccgctggggagcttgacgttcttctcgtccaccaggacacggtagccctcgggggagagcttggtcaggtcaaactgggcgatcatcgcgcgcttcttggccaggcggatgagctcttcgtggttcagaccattggggtcgtagatcacaccggatccatcaacaatggctccgtacttctcgttggagagaagaatctcgttagatccaagatcaccgtcaggaccaccagtctgcagcttgagtagcgtggaggggtcgacgttcagcttgcgctggattccgagcacgtactggcggactgagagagtggtcatgccgtaagaatcgtggggaataccacccagcttggggctcttgccagtgaaaaacgacttccaccagggagcgccacggctgcgagcgtgctcagtggcccagttgacaagctcagcagtgttctcgtcggggcccatgaagaggatctcgtccttgccgtgcagatcaacaatcggatccttgataccggggctgaccgggggcaggagcaggtcgagaatactgtcaatgtacttctcgaaggcgacccgcgccttgtcctggtggtcagcatccaagaggataacacccttggcaccgccttcggggatatccttgttcttgcgctgttgtgtattggccaggttgtagttctcatcgaacaacgaacgagcgttgatgttgtatgcttcgccgtttcgactcttgacgatacggataccgccacgagcgatatcacggaagcgcaggtggaagccgcggaactcggagctgatgatcaggaacatgccgtagagaggctgggggtattcgtgctctggcaagaagtccggcttcaagcggaagctgagagccaccttggtcggggtgaagaagttggtcttgaggatggaggagttgaacacgcggaaggaggtcataaccatctcgtcgtgctcattaagggcggtaccacggatgagctgcttcagcttggcgccatcgaggacctcgtcgacctgcagacgcaggtaactgagggtggggaggaagtcatcaccagattccttggtctgaacgtagtgggtgttggcgaagtcaaggtagagcttgtggatcagctcggggtatttgttgatgatctcgaagatgtaatcagcagtgaaggtctcggtacgaaggcgcttcttgatctttgagagcaactctgcgtggacactgttgttgccatccaaaagagcagccaatgaagtgtattcggagcccagacggttaaggaactgctgtacgaatacccacgcgcagtgagcgtagattgtctcctgcaagctaagacgaccagtggcaaagtggccctggaagcggttctgagggatacagtacaaaagggagacctccttcatgatctggtggatagcagcctcaatgggagggaacttggctgagatctcagagttgtcagagggacgcaggtagagcgaaaccacagtgattccgttggagaagttctccaggtacttgcgcgagctggtcaagcggtagtagtggtacaaatccgacagggcactgaacaatcccatggcggatccctggcggtaagcaatcaccagacgcttttcccggcttccctcgatctcgaacatctcaatgacgggaccggagcgaccaacagccgtggcgataatttcctggtagatcgtcttggtgtttggggtagccttctgcaagaagcgcttctcgccaataatctcgatgttggactcattcggtgaggggttggggttggcgaactggcacttgtacacgaagtagcagcggagctgctggccgtcgtcgccgggcagagcgctaggcgagcggaaagtctccacacggtagctgttggcacccttggagtggttgatgtacttctcatcaatgcgctgttcgtagcggggaccatcgacagaaaccataccgggcctactggtgtcgatgtagacagcatggtcctcggcctctttgtccaggcgaatctccagctgcttatcatcgcgggcataggcggcgactttggcggcgtagagagataggatctgggtcacgatggcatccaccgactcggtctggaagtaggtatcgtcgatgccgagcttgttgtagaaccaggtggtttcggaaatgacaaagtcactagggaagaagcccttctcctccaaaatgtccattactgttgggaattagctacttgtaacatctcgatatcaaccagtcaattccactgaccttgttccatctgcttctgcttgccctcgaatttggccgcgatgtagcccgggtcctcctcagagagcacacggtgcggggtaccaggaatacccaagtgggtgggctgaggggacggttgtcgcgtcgcacttccaacgacatggtctaggtgcttgttatgtgggggaaagcgctgaaaaccgatgggggtgccggtgccggagcttccatcctggaagagcttaggttgagggcgattaggcaagctcacgccattgccattgagactctccgactgggaggtaggtaggggagacgacatgatgtagtatgtaaggtcaatctcttaacacgtaagagcgagaagatgaaagaagctatattaagtcaatcagcatgagcatccatggatgagctgggatgaatcatcgacttggcacgtgtggggatgagataaggcaacacaaagaatgtgcttatcttgcccgggacatgtcccgaggtgataacaggcaaggagagacaaggagaagaagaagatcgaaagtacttactggcaaatacaataatcaccgatcgtcgccatggactgaaggtgagaaaagggaaggatggtttttggatcaaaactagaaaatccggggaaccctagtctttttatacaagacttgattttcgacttttaacgataatatcctccattaatccctatttaattctctattataatatattaaatatagaaccgaatttatttttctattattattacatacatccacccccttgaccagttataaccgatggtaggcgggaggttcaaccgtatagaggtctcgaagcccatggagatccgcagttccaccctgttccaccccaaaacgctcattctctgtccacttttgactaagagccggcgatactttgtacgctgattggacctcatcgcccctccttccgagctcaagccgatgggaaaaatcccgctgcgtcatgcgggccgatatgagagggaaaaattgcctcagagcctggaacgtggctgaggcgggctattttacaggaacaggggcaaaaatatgtgagcgggtgacctgaaaaagccactggctgaactgaaaagagaatagtcgaggtcacctgagatgtcttactagagtgcatggacgatgtatacagggagagaacacagggaaaacacagggaatgatgcaatctcgatcgaacatcgtggaatgcaatgtgtcatggagaacccactcgactgggataagaaacctccgaactttttcactgatgctaaatgcctcattctcaatgttccagccaggatggcatacccccagatcgcatcgtgatcgactgccttactcaattcagatccactggtggctgtctcggtccgggggattttcgcaattaggggatagtttgacgagtttgacgagttttagccaaggccaattgcaattcgatgcaagctttgcgaatgtcgccgggccggctacctagccggtgacaaacaataatatcagatatccccatgtgtatgtcatatctccaactggaggggctagggctggtacctggatgacttgcggggtaaacataatcatctttcatacctaggtagtgcacacgctcgtcagtttcatattgtcattcgttagaaatggcgcattgggacccttttaccccaacaaatatatcgtatgcattttttttacgcatcccaagaaatcaatggcggggcccttacgtgattgtgggatctcggcgggcctgcgattggaagagcccgccggccaccgagggatgaagtaattgccgtcctctaggggaaatgatattccgtccccgtgacgtaaattatatccttcgcctcaggcatcaggcattcatcggatttttctcgtctggggagaccattcccgctcggatgggttccgacccccccgggttttcttcaattcatttggtttagtcggttcttctgacacatagaaagggttccccatgtttcccaatgtttgcgggggcctgattggtgtgaccatcttacacgggctcagctggttcacggctctctggatgtatttcactagtgtttgcagttagggaggaccttgtgcagtcaagtcccaagacatgacacgggctctagcaggtcaggagatcatctgaagaatagtcaggtcgcgtctttgaaagcatattctctgcaaggctggacgaagtggcatagacttcagggttgcaggtaaagtagggctctcattcctggaaggtcttggtcttgggtacaaacctaaggaatgttatagtaaaaatatagatcaccggagacgtgcaagggcgagaatagagcgtgattccaaatgcgagattcgtcaaattcgtcaatgctaatctgtagatcgggctcccattcaagcggagtgaagaatcaattgtctggtctcgatcttttccgatcgaagtatcccctgcgtatcgatcacatcatcagccctgcgtttgccttactatccttggctgaactcatacgggcacttattgtaggtatgcccaagacgctccttatcctcctaccatacagtctggcacctacaaggatatcccgtccgtcgataaggcatacgagttgaactgacgtgtcgggtagactaacattggcttatgtatgttcaagtagtccgaatagctacctatgtagctaggtagtagtagcccatgatcacgtcagctcataatcatgcatgggatgtgttgtacatattgtacctgacggaatttatcccacagttggcaccacaaatatagaagatggtgaatctaacaacacactgggcagccaactcatcacttcccctcttctctacaatctattattgaatgtacatagtcaaacatatatctaaacgagcggtgaaaacggacaagtcaccacgccgagagccttacgtggtcgtggaaagaatgctgactatctacgacgcttgacgaggtacatggggcacctcaataggctagtataatagacatagcacaaaagttgctagaaccacaacacgattactccgtacattagtgttgttattataagcagataccccggggaagcccatccgcgatcgaagggggtacagaattcccgagagatgcgccctaaatcaccgtcggagacccgacacccaggaaatcaggaaatcaggaatggacattctagggattctagagtaacactcttcatccctttcccccagataacttgtgaatacatatgtgatagtggagtggagcgcattgcatattgaaaatagtagaaccactacgctggccccttgaatccggggaagagaagaattgtggagtcccttattcaggcgccgatcaacggtcaagggaatttcagtacttttgtagctcaacggcttgtgcccctgaattggcaaaggaggtgacgatgaatcgtaggaattgagaaaaactaaccccgagtcatggaccgtatcccttgggcatctccgtgtccgatgtgaacacatctcaaacaaaggatttgatatgcgccccagactgtttcggcccctggcgtggtccactcttctccctcgagatttgggcaaaacgccaaaactattacaggtttatttgtggcgtcgtacaatatcctatttcatacggagtacaagtcttatcactggtggattggtgaaggtatatactatggcggatataccggtacttgagccgcccctattataaatacaactacacatacaacccaacccaacccaagtaccttcgggcaatgtctcaatttttggaagatcgtcctagttaatgcacctcgggtatcggtgagcacgtcaaaagaaaaatcatcctaatctggtagcttgaatagacggtgaaaatggctgttgggcgccgcctaaaaatcggatggtaccttttttccggaatagcatacctattgcagatatcaaatagtagattcctgtcgccaccctcaagccgatctcctacaccgcaacggaaaattcccttccatagccccggcaatctggtcgctgggccccagtttttgttctcgaaaggatcgccgtatccgctctcgtgccgaggtcaagagcgagctttctccgggaaacgctagaaggcgtagaatcttagaaaacaacccttaaaatagtcctaattcattagttctaaacagagccttgccgattcaaccggtttaatcggctttcactagctgttcccgcctccaagctagttgtttctatggtaaataatgtcaataacacaatgcataatatcaattggtcgattcatcgattctcaccccctggtcttctcccccacactaacgcgtcagccccatctcctttgtttttcttttctccccgacaggttttccgggttgggctcccgttgttccgatggggaatgtccccatccctgcctcgatagctgggttattgggctgtttagaatgaggcggataggcttggcgggcagatctctagggagtaagcattgggcctggccaggtatgcgtgtactgggtactttcgtgcttccccagggaatgtactcctccacacttttatggggatgacttagttttttttttagtttaattatctgttttgggtgtctcatctttttttatattattatttattgacaggaaggaaaaatataaacgacccattcaccctgaaattgtctgactcttttttctagttctgttcattcaagtatacaattattattactacatactcagcactgttaacagctttgctatcaccgctcgctctgatcgtcttcaagtcttctaccagagcaatactctcgctgcaataagtttaattgagcctcctcacaaccgtcacaacgacaatctatcatctcaacaaccgcaactcacttctcgccttcgacgcttgttatattacatctcctcaatacccgaatccaattcctttgatccttgtaagtataactcccgtcactacttgccacatcacctccgatccgatccaccgaaaccgggcctcgggcaacttcggagcccacaagctccatctatacggagcatatgccaaacccaagtacaaagcacaagcgtccgcacaaacagaaagctgacattcagtctcgtgaatccagctcagcaatccagccttatacattcttcccagccgaggttgccgatcaactgcatactttccccaagtataaaaccccaacaaaccaacaacttcattcttcaactatataagcacttcaacgggagtctatttatcctctcaacatctacgcctcccaagaaatccaaatccatattctccacatccacatccaaaacaatggcctccgtcgcaaccaaaaccgcaacccccgtcatgcctccctccttctcaatgtcgcaggatatctcccgcgcaatgacagcctcaacccaaaagacagaaaagacccgctcagtcctcatcgacggcatgcctcccgcgcctccgccatcccccgtcgccttctccaagggcaaggctggctacaataatatccccagcttgagcctggagtgattcaacctcttcttttcttggtttcggattccgtcctgacatccttcttcaatacgtcttcttcttggccttctcaagaaattattgcaccatcatccaatattccctgataatggtctttcacatggacatgtgggacggcagatttgcccatcctgtccattgttctcttacattcctttttacttcgtccttgacttgatatccgcggtgctttctagccttatgtctttttctttgggtcgttgtctttctctttttgcttgtcgccttttggtttagcgttgcatggcggcgcggatatgtgatctggttctggttgcgcaatgggcgcttctaaaagtctggggaattggtgtttttaatggttttaccctgggcttttccgaatcagaaattgaaattggataatttatatatatatactatgcttatgtgaccttaatggtgatggtcgacacattttcttgctgataattgcccggtgtatatatgtatagatacatacgtagtggctccgtattgtactaccttcaatggctttactgctacaagtatcatatgtagaatgtaggcggtttggtatttagtgtcaaccttccgaagtcggatatacccgtggacggtgtgactgtggctcacataatggctgctagaagagtattttcatgcatcggagttgagaagtagcagctacatggtacaaggtacacggctaggaacctgtagtccgacgcaagcaacgaaccatctgcttgctgcatgtgaagatctgccgatcacgacgtcacccgtctcgcattgtggaagtagatggggtacacaacctgttttgtactctgcactgacgttctagatgccgaaatgggaagaccagctacagtatacagttggcttgagcagcaaaatctgtgttgtatcatagtctccatgatcagtgattttcaagatgaacaagaatttatgcttgtattgggtttgtggatgacgttatcctctagatctacctatcttagcgtagctaggatggctccattgatgggctgtttgctcagtcccgaggttaaattgggcggtgcttgtcatcggtggttgcttgttggggtctcccggttgtgatgccattccaccgatatcgtaagagaaaatcagctgtgtgtttccatcacaagagtagcgcttttgcctccagcaagggtgtcgatatttcttcgccggtgctactcctcggttcccggttcccggcacttccacgtgacagcacagtcggctacgtactacaacgtagatccaatgagatgccgacaccgggcggcttgttcagggcccggaggatccattcaaagacacagggtctagacccgaactctgggttgaggtcagttcactgtcgatctgtacgttcatgaagtaagatcatcgctgtcagacgttaactccgagtcggactcagactcagcctcagcctcatcagggttgagctcttggttgacctcttgaatcagaagctcaagagtcgccttagcctccaagtcccctctcgaagcacgttcgttcagcctctcgatctcagccagttgcgcctcagtacgggcccagccttgctgtctgtctgtcatattgacctgccgacgtgtactcataatcgtgcgaacggtatccccctctcccttgaggttcttgatcttctgcaacctctggaggaactgcgcctggtgggatggggctgcgggacgacggggtgctccaaggggttcggcgccctgagaagacacggactctgagggtccctcagtaacgcgttgagctggtcctggcccagcgctcggggcgagctgtgccttccgaccaaggatcttcacgctgttggcggccacaagctcgtaggagggtccacgatgtagcggttgagggaaagggttgtctgggtcagtttctgtgcttggactgacgaaaataagctcggtgccaatttgatcagcccaggagcaactgaacatctgattgtagtatgaaatgattgggttgctggtgtggaggtcgagaatttggattcgttcgttggggaggtagcctgtctcggcgctctcgatcggaggataagcttcgcctggaaatccttggcccatgtcttctgctgggttctgtgtatcatccagggacccggcttcctttgggcgacggcggggagggcgcactggaccatggtgggcggtcaggtccaggttgagataaaagctctatcaattgattagcagcattgagagaagacaaggtcaattatctcacctctgtctctgtgccatattcatactcatattcttcatcggattcgaagtcagccattgtatgatgaattaattgttaaggtctgatctccctggaaccggagataagatctgagtcagctttctgcaggatctggaagcggtgagccctgatctttccccctcttcccgatcgggacaagatcttgttaaccttggagaatacggcctggtggcaaaaatgggcataaacacttgcatacttttttaaaatgtttcagatggagggggggtttcccataaacaattgactctatttccccccttaccacaatgaactatttttaaatattattttgatgtgcatctacatctgtacaatccaaggttatacgattccgtctagaacccaagtagagttgtgcccagccctctcctccatcagccttatggaacatcccacacattatcctcaccgcaacaactcagacaactcggacaacaatgggatcatcccttcgtaggtttccccgtctcttccgctccggctttggacggataagccatgcactcggtatatggcatccggcttggctatggtttctatgcatttccgcaggttcccggtgcctagtccgagatattggtcatctcttgcctgtcccttttctgatttttttcccttttaaaaattctattcgggcaattctagctggactcgggaaatcgggctaacaaaggcactgtgtgttcctatataggtaaccccgcggtcctgttgtgcgccctccttgtcccaactctcgttatctctcgtcccaccatagtacctggggaatgcccgaccgctgcagccctaccacttgactcccactgcattgaacccctagcctcgactggaattcccgaaatcacagtctatgaacatactccacatagttcttcggccctgacagtctatgccgactcgctccagcagatgacccgaaaggccaaggcaaccattgccgtgctctcaaccctgatcgcttatgtatccgtcaacagcataatccacgtactccggccggctgctttcgtctggtctgcggaggaccgggaggagcgggactggattgcgagctcgcgctcgtggttcgaccgcaaatcctgccgatggctcagcatctgtggcgcagcccatttacagaccgtacacggtgaattcggacatcgtgagccagcagagagggtaaatgcgcaagatgccgagccagaggctccatggcggtccttttggattagcggggctagtgagtccgagtgggatgccgaagagcgggctcggcggcagatcccggactacgttttccactatgccccactcgttcacctttattctggcgagcagttctggccgggggatgtcgcagagcacttgcatcataccactccgaccctgaattacaccccgattcaggcccaatgggaccatctgacgctgcgcgatctggatgagttgaacaagtggggtgccaggcacgttttcttgacgagcaatgatgatgtacagacgcgtccaccgtggctggagggcgataggaatatcccgcagacagatgggaacaataaagaagaatcctgggcggattgggatggccgggtcgatggtgatattcccggtgacacgcaggaagatcgagccaagtggtacgattttcaccaattgcaacaagaggctcccgctgtacacgaatccgacaccgatgaacattttcaagcccagcaaatactcaaagaagagcttcgcagacgttatggtggggaggagatctacgacagtggtgccggtggtcgaagcgatgcccctgcaatcctggtggtgatagacaaaggcaacggaattgtcgatgcgttctggttctacttctacagcttcaatctcggcaacaccgttgtcaacgtgcggtttggcaatcacgtcggtgactgggagcattgtctggtgcggttccacaatggcaaaccgaaagcgctcttcttcagcgcccaccaaggaggagaggcttatagctacgaagccgttgagaagatcggacaacgggtaatgctccaatagcaaagcaggaagtgctatctcactaattctacctcactagcccgtcatctactctgccgagggcagccatgccatgtacgccacggccggggtacacgagtaccttctcccctggggactgctgcacgacgtcaccgaccgcggtccactatgggaccccttcctcaacacgaaggcctacacttacgacctcgacaacaagcatctgcgggcgtccactttcagcccctccgctccgacagaatggttccattacaggggccactggggtgacaagttctacccactaggcgattcccgtcaatatcgatttgcaggccagtaccatttcgtgaacggaccccttggcccgaagttcaaacatctcaaccgccataaggtgtgtcagggcccagaccgttctccctgcgttatcaagaactatgtcgagcaagggaagcgacctcagcggtggggctcaagcagacagggagagtagctgatcgtggagatctgttcaatctctcaagtctcacctatcggttacggttacggattatctgcccatgtcccccttccctgtggtcggagtcttatgaaaacctacccattatacccagcctaaattattaaagcaccccggagatgattcttgctaacatattttcttatttccttttctccatgcgctttttcttcgatgttttgcccccagataccccctttgttactgagaatccttgaccaaggccaacagtatagacccctcccacgaatgagatcatgacccttcatctgatttgacacgaattgcatgtgctatggcgtgtttatggctttgattcctactcccctcttttcttttggatccgggcgttctgcgtgcttgtgttctctttgctcaaaagctcccaacaacctcaaaaaaatgattggcctattacgaagtaccatgggtgtatatttggttatacattagatattacatttgcttcaaagttttcttttaatttactgccgtagaatgagttattggatgcctcccaaggttggtttagatgatgccaagtgccgagcagccgctgatatcaagaactcagccctaactttataccagcgactgtaaaaataaccacattgatttacaagtgactgtacaacagaatgaaaaacatataccactatatgggtacatatgtagtaaacatatgacaagaaaacataaatattttattcagtatcggacctctatccccgaatctcccaaagtcgaatggcaccttgctcattaccaacagccaactgctccgagttcggtgaaatagccaccgaggaaatgcgacccaacggtgtgttagaagtaggccagttacggtatacggtgcaggtaggaagatgaactataaaagcaacacagttagcaaagaacacacaaagacaagcaaaccgagagaacataccaagacgcaaagcatcacgcttccagcgactcgccataaccagcatctgcccatcaggcgcaaacaccaagtggctaatgggggtagtgagctgatcgagcacacgcacaggctcagggttacgcggaatacccgcctgagccggggaatccttctcagcagcagaagcattggcatacgcagccgcccactggcgacgatcataaacgttaacaataccactcgaagaaccaatcgccacccaacgatcaccgccaagccgagtccggcccgagcgaccaccaaggctgagaaccgtcgtgccgactgcaccggcatcgacccagcgcgccacaacccggcctacacgtccatcccactcagagacctcaccgttcttcgacacaactgtcataccctcgccgtcagaccaccaggcgaagtctgcgacaccgccgcggccgtcgacgcgcacctgtgcgatccactgcgcggtgttcgcgtccagcacgttgatcagaccgccgcccttgcgggctgtaccgactaggccgacgaagcggccgcatggagagagcttgaagcgctccatggacttttgctcttccttgcggtcggaggagccgttgaccttgtcgactttgccggtgtccaggtcccagatgtggaagtagcgcctgcggccggaggcgaagattttgttgcctgtgggcggggcgaaggcggacgtgtggattggtgtgtgcttgatgtgcagggaagtgaggagggggttgggagcgggcgcggagggagagatgtggtgcaggaagagggtggatgctggtccggaggagagcaggagcgggtagtgcgggtggaaggtcagggagtcgacggaggagggttgggatttgccgatgtccttcagtctctggatgtcgatgacctcctggcgcagcttgcgctttccgccggagcgcgcgttgtcttctatgcgtgtcaggtcggaggcgttttggaggagcttggctagcggctgcatcgagaggttctcgttctcatcgtccgagtcgatttcctcctctgcgtccgagtccgagtcagtcttgcggcgcttgagctccggtgtggcccactctggtgtagggtgtaggcgtgtgaactgtctgcgcagtcgtcggacgtattccttgccgctgactacatcttcggcctcggtgtcgcgcagtttgcgcagcctggcttggcttgctagcgacactgcgaggcgatcgtcgtcgctatcgtaccatactgcgggttcgtcctcttcttcgtcctcagcctcggacggggtttccggcgatgggataaaatcggcggtggggggtgcgccggagtcaaggaagaaaagctaaagaaggcagaattgttagatcgaaagcctaagatcggtgaacgcatgggagtggagtcgcatacatctgaatcggccagagcagccaaatcctggtcctcaccctcctcggcatcttcgctaacaccgctctcgtcatcactgtgcagagtgagagccataccagcctcgcggtcctgctgggtcttcaatgcgcccatgaacccctcatcgtcgccaaaaagcatgcgctctagcttcttctccgcctcatctttctcgggcacgtcgtcctcatccgagctagtttcgtcgcccatttcaacatctgagtcctccgggcggagattggccgtagtgttctcgaacggagaccgggtggtcgtccgcttggacttttctttcagccctacgttaggcatggtggttggtgtcagaaaatctgccaatcaagcacagctgcttgcaggcttggtcaccgaattgatacttgtatgcaataatgcaattgtaggctgcgaatgttcctcaggcggagctagaatatttttcttctttgatttttccagaatgggcagatcagagcggtgtggaaggcggcatatgttattgccttggctttaaggcgacaaatgagattcaacaccatccaaaaatgagctttaacacactcgtttgatatccttttttatcctcttgctatatgtgattgatgagaagagtaactgttagagctaaaaagttctttttgtgcatggaaaaggcggtaagcaggggaaatggaaaagtagacagaatatataatgtcagactgggatatggcccccattagaccatatacattaaccccggtttttgtgtctttaactaactacataggtatccaaatacagaatatagatgtgtgcattccacatatgtatgtaggaaggaaggaagggaaaagatgataatcatactaaatgtagtaagagcgaaataatcatattcacggtaaagaccactatcaacactaaaacaaaagccaatatgagatttccgaaaccaaaacacaaagcaatatttagtgatgtgttgaagtagctttctggtcatgttcgtcaccgctgctactcgagctcggaggcgcataaggagggacaggattttgatcctcaggaagtaaatgctcggattcctggagagcatctgcagtagcctttggttgtgaggcagttgtcggagatttcccgggttcttcatcatcagaatcagttgcatacgactcgtccagaccagcaagaagagcctcccggcggagagcatcatcatctgtgacagcatccccaatcgtgtcgtccaccacgtattgtgagaccggtttcttgatgaatatgtcgatgatataatactgtatggcgttcatgatgactgggaaaagaagcatgacgaagaaaatctggacagcagcgttgccttctgtccaccttagagcccagtccccgactttgataatgaaaggtaagagctcgatgaggaagaacacgcatatcttcatgccgagtaatcccatgaaataaacaacggactgcttgagccaccatgttacacgtggaggctggccataatttcctgactctatcgattctggggggtttgcgagaggtgtgtaggatgcgaaataattgagaacgcggagaaggaggatcagaatcggaataccgagggtagtctgttcatcagttagctagcagctccccaaaagagattagagtaagatcagtagtgacgcacgtcgattcccaggttcagtaagtagaacgagcatgggttcggcttgtatgagcttcgaatctccagttggcccgcagagaacatcgacatgaccagattgagcatgtgaagcatgacagatccgaagacttgttttgagacgtcaaaggcccagatcttcaccgggcgctgtggtcgttctctccatctcttatagactagagataataatgcgaggctgccaagagcaatctgaacaaacactgaaaatggaccaagcagcttgcattctcctccttcatcatttggatcctgccctggacttgaagaatttgttccatgatagtatagtgtgtgggcacccgagggtgttggaatggctcgggcaccggtagcagcgataagtgtgcttgtagctatcgacgccaacgagctagtcgcgtcatccatcgctttttagtcaggtaaaaccagaaactcagtcagaaagctcaggtagaacgcgacatatgctggaaaccagatcgtagtaacagtacccagtaaacttccaggaaggttatcaaaggcggagaggatcgaacgtcatacgtgacatcgaaacgagtggcaataaactacctaggtagatcagcggatgaataggaaagcctgaacctgggaaatgtagttctttctgaacgtagaaaagaacgaagttataggaaaagaataagggtgaagtgagtgagattgcagtgctgctgcgccctaggcggtgtcaggatccccgcagcgggatcgacaaggccgatagcatttcccttccagggtttggacgggctatttaagggtcttgcgtcttggcatgatatttttattttgctatctgctttgatctggatcttaatatgttgtgtgtacatcgtataggtcaatgtcaagcttaaaatttccctgcagaagagtgggtactgatcggtgatacgccaacgttacggtagatagacagaccctagttttagcttgacaatgtagatcaagatgccacaaagctcgaaaacaggcccagactcgattacatatgtagttgggcactccgagtagtttggctctcataggaaccttcgcacctagtatctagccatcacacagagaatgttggagcaaagtggaaggtcaatttgacgaagagagtaatagtagtaatgggtaaatagaataaacataagaagaaataagatctcgccggcgtgctgtttcgcacgatcatttctgggtcaatatatgactagaaccagccctcgcccaccatcaagccctctcaaaaagaaacaaaaaacccagggaataaaaacgccggaaacccctcaaccaacccgtgattgaatagtagagccgttgcaataccatggcgcagctaaatgctagcagagggaagagaaaaagaattcgtcacatcattctatcccgtgttgctgtttgagcctttctaaattctcctgccgttccgtaatgtcctctttcgttcggaccatcttctctggctgatgatacaagactacaacccccgaagttagtcatctccacataattcccgacgctcatttgatccatatgtgatacgtaccaaccaagtatctgttctggaagttgaatccattgagcttatcgcatgcctgtttggcgtcgtgaacgtcctcgtagacaacgaatgcggttcctttggaggtattggcgataccctggcgaatttggctgtacatgaaatggtattagatcggtttgtaacacgagaccataggtgactattaccgaatggggccaaatttgccgaacaggtcgaacagttgctctgctgttacgttgtagctgttgtgaaagatgtcagcgacatagtcgcgatttcaaatggcgagttgcaggattgatccgccggggaagcgagccgtagcaaagcagcgaaatgatcaagtacatacttaaggttcttgacgaagagaatcctgtgaaagaagaagaaaagaggttagcgctagtcacttgcaaatgtcagggatctgctaaacccaaagatcaagctgttgatggcaaaatggcacttgtgctgagaatcgggggaggggcatggaaaaagtattctcacgtaccgattggcttcgggggcgagctttcggctcattctcagaggtgagagagtcctggaagatgttgaatgaaagtgttgacaagaaagatacgcaaggtatcagttgcagtgttggaatagcgaagaggcagaagatccgagcaaggcgcaaggacaaccacgaggtttgtcttggcagtgcgcttacttatccgggtttagtggcagttggttcgtaaaccgtatgtgaccaggtcatgtgattgctatgggtgtagtgatctggcaaccgttaccacgtgattgtattatcatggtatcggagtgtatcatcaagacggacgctctcggcgtcgccaacttcctttggactacagagaattgagcaccagggggaaaacaaccaggtaaacacaatcgcatgttgtaacgagagcttcttgatctttatcttttatatatgcaattcagatcccctttctagtaaaagggatagcaggacacaacgtaatataggagcccgcagctgtaccgtaaccttcagttgctactactcgactcccgcttcctccttcaccccaacacctcgcgctcatccgctttcctctcgcttccggcgcttcatccattcgcataattgtcacttcctatccagttgacaggaaacgattcctggctactggacctcattcgattcccttccctacctgcccgcaggttgcggcgcgactctcggcgcctttgtcctcccgccgctcgattcgaaccccctcaactctccgcgaataccgtcgaccacctacttcgccctcaatctttcatcaaatatcaatcggatactcgtcatccgtcgtgcatatgctcttctgccaggaatgacattcccttcgcctgcgccggcctctcgctagcccgtgtggtccagtatccccgctttgcacccacccaccgcaagcgcatcttttcgcaccttcgaccctccatcttaaattttctttaatatacactcttatcgggttgcgaaaatgatgagcgcagcatctttcgcgaatcccatcggcggccgcccgccgcagtaccgtactccgtcccctcctctacgcgctgtcgaacctatcactccatccacaaccaccgattttcacacctcttgggccagtcgcggccctccgcgagctgccagccttgatcgcgatcagcgtccttcgaatcacaatcgacatgtcaccgcggaaggtggttcacaccagcgatcgggccatggccgctcaagctcgactatcgacacacttgcgacgatcgccctcgcgacaagtcctaccttcgcatcgctccctcccaatcccccttcccccggcattcggtcctcgattcccttattcccatccgactccgcagactctgaacgaccggcgaagcgggcacggtcggcgaggaattcgtcaccctaccgcccgcgcccaggaatgctgacagaaaacccacagccggctgcgcttgagagcatgacaaccgatgcagagcttctactcaatctcgcgcgccctactaatttccacccgggcaaccacactaaacgagtcagcatcgacgagacctaccaccactacgctggcgacgcgattcgtcaatctcgagttggctttgctgccgttggacatccggaccagggcgatgtcaagatgaatcacaattctgaagatataccccattcccgcatgcgctctcgatctgatgggtcagccttcatatcccgtcctgcgatgcgtggaatccgcccaactactagctctggcaatttcccaccaattgtttgggaggatgaacacgaaagcaaagcctggcatccaccagctgatatgcctcattatactacttatggggtccaccctccggccgatcccaaggaacctcaattcccgcagaattccctacccattccaccaaaagtggaagaggaagaaggtgacaccaatcaagcaagctgtggggcatgtcatctagttcgtattccagttgagaccgaggaacaggacgaagacacgtggatcagttgcgatggatgcaaacgatggttccatatcgtttgcgctggcttcaagaatgatcgggaagttcgcacagttgacaagtttatctgtcggcgttgccgatcagtttatggccaaacaacttttgtacgcaagtcctcgcgcgcccggacagccatagactacgcaggcctgaaccaaggcctcgtcaaggctgccactgactcattggaacatcactatctcgagcccattcgacaaggaaaaatccgattccaacctgagaatttcccgcgaatgaaacctgagctcgtcacagcggaatacttcgagcgagggaatgggtggacggagcctattgtgatacctgcctgctggaactcgtgtgagcctgtctcctcagagaacccagactttgaatctcttgtacaggaggcttcgtctcaagagatgtttgatgatcttctcgagaaccacccagaacaacagaccaatattgaagaaacagttgattgtggccaagacctcttaggtatggtcattccgcggggtctcactgttcgtgcagtagcagagctttacggacccgaagaaagggttgaagtgatcgatgtcaagtctcagcaaggagaggataagaggtggaacatgcagaaatgggccgattactacgaaagcaacgagccggacaagcctgtcaggaatgttatcagtttggaggtatcgcagagcaaactcggcagactcatccggcgaccgaaggttgtacgtgacttggatctgcaagatgctgtgtggccagatgaactgaaggcaattggcgaatatcccaaggttcagttctattgcctgatgtctgtcgctgactgctataccgacttccacatcgactttggaggatcttcggtgtactaccatatcctgaagggcaagaagactttcttcttcattcctcccaaagacaagcacctcaagaaatatgaggagtggtgcaactctcccgcccaggactcgattttcctcgggaaccagaccaaggagtgctaccgtgtggatctctccgagggagacaccatgctcatcccgtccggctggattcacgcagtctggactccggaaaatagtttggttattggtggcaacttcttaaccagattgaactacgggatgcaaatcaagatactcaacatcgaaaaggagaccaaagttccaaagaagttccgttaccctttcttccaaaagattcagtggtacacggctcaaaagtatctggaggatgaccccgtcccgcaaagtgtgatggaggcattcatgcaggatgagaactaccgtttccaccgtcaatatccaatttattacgagttcggagaacgcgccaaccgagaacctccaggttctccccatcacaatgcacgtttttattcacaggcggagttggagggccttcttgagttaaccaagtatttgctacggactgcactcattgcgggtggctataccgtcgatggagtcgtctccatggacgttcgaaacgcggtcagacgctccatccccaaaggcacaggggatccggtggacatgatcagaaaattcggaatttgggtcgcctggaagcgtggtaacgaaaaggcaccactctggactcgacctggcgtcgtcgaaagcaatcccaaggtttctattacagacaaaaagcccgcaggacgacctagccgtcgatccgaacgcaacgttgataaccaacgcacctatgccgaaagacaagcggtccaatggccttcagaagaggcccctgagactccgaatccctcagccagcagtcttgtttatgcgcagtctgacggaagtgcaacaccggcgccattcagtattgctccggaaacgagtctcaaagatatcgccacacccaagcctcggactgtccaacgaacgtcaggtcttggtcccaagcgcgttgcatgtgatgcctgtcgcaaacgacgcattcgatgccgacacaaagatgaacccggtgatctcgtgctcaacgggcaagccgcagtcaatgccttcacacctggctctggggtgagcacgccgtcctccctggcccaggatgctgtgtctgctttgaattctttggcagcgattgcatcgcaatctgggtaccaaaacaatgggcatcttgttgacttggatcgattcgagagctcagcgagattccaatccgcggtcatgggcaactcaacaatagccgccaatcggctcgttgatgtcagccccgatggagctaatggagggaaaaagggccgcagcaaggcgtgcgatgattgccggaagagcaaggttcgtagtacccccaaagacgcttcttttgcttgttttactgtttctgacccgaaaccagcgccgttgcatccacgatgagtacggtcggatagatccgatcaaggctcaggagcgctccaaacctcgtgcgaatgcttccgccaaacgagcacgccctgctgaagaggatgatatgccttccacagccaagaaagcgaagcaggagagcacatcgcccatgacacaacctgcggtattcttcgattatgatggcgatgaactgatggcgcaagacgacgtgatggatgcctatgatcatgtgcctttcagtcaaattgacccaggtaagcatttgcctgaggcagatcaggcacctcaaaagcaagttctgtacgcatcaccacctgcactccaggccgagtctgtggatgcaaaagaaataaaaacagtgtctgtgtcttcctcgaagccaaacacctccttggtctcaccgcctacgtcgctggccgacgagatggatggggcccaagagggagatgccgtacagtctgtggaaggggaagtgtcaactgctctccacacgcccaactccagttctcggcattcgtctcgccaacctcgacacgtcgatcggttcgcgcccgatgcaactacagcccgggccccgaaacaatcggtgcgagccacgtcttcgaccatcggggcacgcaagaccactcctgttccagcgtcgacaagaaagccttcatcacgtccctcatcttcacacgcgaagaagagctctccgatgtatgaaaagcacttccatcgtcacgcccctacatcactatctccgcgtcagcacaagcatagtcagcacgtcattggagatgaagatgcagacgaggaaagccttcgtttgatacgagagctccaggaacaagaatttagtctgcggaaacgatcaacaagggtttagcttcgcagaaggcttggaggcttggactggtacagatgagagatgtagaatgggtcctgctttatgtttttgttattcgggatatcaatttatcaagggttcaggatgggagatccggtgttttcttttcttctttttcgataatcacgttttcatgttatttctggcgttttctgggtctgggagaactagggagttttcttttggcttcttgatatcaattgtcgtctgcatcaggttcttttgtcaatttgctctgccttgctttttcctccaggtttcaactttttttccctctctagtttctttattctttattctttattcgattttattcccctgtggatcttcgttttatgccggggcctcttcacaaccaatacaccttgcttgataatcgtctgttgggctttctctctcccttcggctgcgcacagcaatgaggtgtcttctgcaagtctcatatatgtacttctttctttcattcgtctgacacaatctgcgtggtttgccctcatgcatatatcagcaatagggctatttaactctcttcaatctacgttcttttatatgttcgacgtctagaaaaaatactaggactaggattgagtagaaaatacgggggaaaatgaaatagtagtaattcttgtagaatccttgctcgtaccgaaataataatgcggtgctgaaattgatgcctggatttgaagcttggatttggcttggaccttcctccctctcttctttatttccttctctctctcgcgcaacaccatgtcttctgagtttgctaaagagcgaaggagaaaggctgtaagtcatatatttgtacgggatctacctcatgatacatccaatgatggacatggatcatgtaccccgatggatttcatcccatcccagttcgtctcatcatcgattgacttattatactatcacctcgattctttcgaggccgccctggccgacaagttctcatttacgatagcataagcacgctaactataagtaggaggaaaaacaacggcggcgtgaccgtgacgaagaataccgggcctttatggctgactttcggagggtgtaagattccaaggttcttattcccttaataaagctgttactaattaagattacagcgcgcgttcgaactccaacggcgctcagcgtcgccggcgcgggctagccaagcctccccgcgccagaggtctccctggcccgaaccgccgcgcccacgttccccccgcgccgccaccctccaagaaagggcccgacaagactccagggccgcgcagctcgccgagaggggcctgcctgtcaacacaccatcaggcccctctaggcggggaatcgtcccttcccggcaggccccgtttgctgccaaccgtacgccgccgccagccaacaagaaccaggcgcgtacgtcacctcgagtcaaggaggagccacctcgagtcaaggaggagccacctcgagttaaggaagagcccagcagcccacctcagcgtcccgaggccgccgtcctccccccagaaaagtcacccgagaatttgaaaaaatttgaaaaataaaaaaaaatcttgacacggcatgataccacggagttctttattttcttttattaactaataccgctatgtatcccgatgtccttaccaacgtctattatcatcatcaaattctatcatccttgagaggaacattacaagaaacatcgttcaaatgtcctgacattctttcccagctcttttgacttatcaatggctagttcagaacagattccgttgccggctcagcagtccgcagcactaccggtatagtatccgtcatggcctcagccgagctactccaaagcagagagtacaagccgtccgtagcagttggtttcgcgtaaaagttggccccgctcacggtgacgaggacatagcccccatacgtggaccagacgttgctgtgcttggttgtgtccaacttccccgtagcaggtacggcggtgaatgagactggattggagtccgtgtcgccttggtctagacacagcatattggtattggtcgacagggtggtgaagccctcgttggaacgagagctagaactaggatgggcaacccaagtattttcagcggcggtgactggattcttgtgagtttcatatagcaagtagggatcttgggttcttacagttgattggggtcattgcggccattgtggtggtgtctactttggatgcatccgcaacttcggcactgcctgttgtaaaggtgaggtggatgagtcaatactgttgtgctgggggcttgagagggctgagataccattcctgtagaagatgggtagtcccctaatgcctgggccataggcatacagcttgaatgaatcggttggccttgactgccgcttttcaaatgggtgcgcagagcagactagcccaaagactagaaggggaagaatagatagagatagcattgtgcaatgaataggtcatacaataggttggaacagtgtgtgcatggtagtgagatcaggatgaagcaagacttatagccctgaaacggaaagagtcatgaggatatagtcgatgagacggcaattgatgtaatcagaatcaggcagcgcactaggggctatccaatgacatgtgtagtgttgattaattcttctctctacttcccaagactgtggtccaagcctccttttgtgatttggactgacacgagctgacgatgatacgtaatttgcagctccattcccgagatcgtggtaaaagagaaacattccttgtcatcatctgtgttccatgtcgaaatccagatcctggccattacaaccccaatggtcagatcaatgatcaactcaccatacatggaagactctcgcaacgatcgacaatcccggacaaagcagctgatacctcaaaaaagtaaacatcaaagtatgcgagatcccaaaattaatttccgagccatgctgactctcgtatacactaaggctgaaactggttacaccgagacagcataaccccagtccaagccctacacgccaatcttactacgatcgaaactagagaatgacgtcccagatgttcaatttccgtcattaactctatttgtaagcgttatctttgttgatttgagacacacagtcctagttacatgggatatccaggctctccattcatggtactatcacgagagaacagacagtagagaacagtctgcggactaaaaacggccaatacgcacttctctgactaggcagcccatcgtccagctgctgagcaggcccccaagctgatgaaatgacgaacggtcccaagcgtggatacggggcgccttgatcttactatcccactatccactaacgcatagcctcaacacccgagctaggcgatgacgttgatgcttcgccatagccctttgtctgctgcgtcgtctcgtgcatgacaagatcatgtttcgcacggcatctccggtagggatgcccggtatatccttgttaggaggtacgaatgcaggacacctcgtgaaaagagacatggcgttcttggtcctggtcgtacatccacgtgttgtgctgtacgattccaatacatatgatagtggcataaatagaggtcaattttcttagtcgtgtatcagcagcaagcctcgtacgttctcttatactcaaagttttgctttctcaatcgcttctggatgcgtcgaaagctctgtatagagctatactcgtgacccaaagaaggctaagcattataagtgccctgcctgggtagaattcacaactatgaaactccaatctcttctcctcctggcatatagcctgagtgcttctgtcgcagtcatttcacaaaatccagtcaattcagtgaatgtcccgtcgcaaacccggcacataacaatgaagacaacgcacacgacagtcggtaccaaaaccaagaccaccgccaacataaagcacacgaaaaccaccaccaagaccaacaagccaaccggaagaccctgtgcgggcaacacgccccgaacacggtcccagtggtgccaatttaatgtcgacaccgactacacgaagatagtaccaaacacaggcgaaacacgggagtactggctcaacgtcgaagaactagtagcagcacccgatgggttcagcaggccagtaatggccatgaacggcacaatccctggcccaacgatcttcgcagactggggcgactgggtcgtgatccacgtcacaaacaacctacacaactcccagaatgggacaggcatccactggcacggaatcagacagaaccacacgaacggcaacgacggcgtggtctctatcacgcaatgtcccaccgcaccaggctcgaccataacatacaaatggcgtgccgagcagtacggttcgtcgtggtaccattcacacattggactacaggcgtgggagggtgtgtttggcgggattgtgatcaacggccctgctacggcgaactacgaggtcgataagggcagtctgttcctgacggattggtcccatcgcactgttgatcagctgtactcggaggctcagacggttggtcccccgacgttagatacgggcttgattaacgggaccaatgtctttggtaatgggaccaattctaccggacagcggttccagatgaaggttgatcaggggtcttcgtatcggctgaggattgttaattcggctgttgatacgcactggaagttcatgattgataatcatacgcttactgttattgcggcggactttgtgcctatcaggccttatacggctaattatatcgatatcgggatgggtatgtgatgtttcgctttgatatcaaactcctcgaaagccaacaactaacaaaagcacccacaggccaacgctacgatgtgattgtaacggcaaatcaacgccaaatctccgactcattctggatccgcgcaatcccgcaagaagcatgctcagaaaacgcaaacccagacaacataagagggatcctctactatgggaaccgacccggtacgcccactacaagaccgtacaccttcccagacgaatgtatcgacgaacctgcctccaaaatagtcccccgagtttcgaaaacagtctcagccgcagaatggaataacctaaccgatgtcacactgcgccggaacaatgccaacctatttcgctggtacctcaacagcacaacgatgcaagttctatgggaagaacccacgttactacagctcttcaacaacgaaaacacgcccaacttcacaacgtcgagcggagtcattgagctgccgcgggcgaacgagtgggtataccttatgatcaacactagctttccaatctcgcatcctatccatttacacggacatgatttctttgtgctggcgcaggggtcgaatccgtggaatgggagtgttgtgactaataacccgccgcggagggatacggcgatgttgaatgggaatgggttcttgctgatcgcgtttgagacggataatcccggggcgtggcttatgcattgtcatatcgggtggcatacggacgagggctttgcgttgcagtttttggagagggagagtgagatcgagccattgattgatcggaaggcgcttggggataattgtgcttcttggaatgcttatgatagggcttttgatattgaccaggaggattcgggggcttaggaatatgggtttatggttctagatggggttgatctttgtatacatgttggtgagcttcgtattttgtacatgtaggtagacgggcatggcctctagaccgtcttcccgccatgttgcgctgttatattagttgagtcataccttactgcccatagatagttctaccagctacacaagtacatgtgtactttgtttcctctttcatttcttggcctttcctttccgctttaatgatcaggccttgtcgctttctgaaagcaggttgaacggtatcagagtattatatttgatgagcaaaataggaaacgagaataacacgtataaaagacaggatatgaaatcgtatgatacaagtcaaggaatctatcgatggtgggcaggaacttcaggccaggcatcgacaccgtcaagcaagaccatgcccatccccgacatgaggtgggtctccatatggcaatgcaagaggaatggccctgggttcacaacctggtagcgaatagcaatccaggcctctccgttcggcgccgtcacaaaggtgtcgcgatacacaggcgtttcgaagaagctgtccgggctgctctgttttgcttctgcgatagaaccccatgtgaattttcccattgcactaccaatcaagaatgccttgttggaatgcttgtgcattgggtgtggtggctgcagcttggttggctcggggatagcaagctggaacacaatgtccacccacgtgccattcagtgtctcaatcttgagggcagaatccaggccgggtgctttggggttgagaatcgctggttccatctggttcaggttggctggtaggaaggttgttccatccagagtccattcccaggatgagttgatccgtccaagagttaggagatggaaatcatcgctatgctccgcaggtaggatgggaggatatggcggcaggttagttgtgtccaggtcgatcacagaggctgtggtgttgctaccaccgtaatcgatgtatgctgttgattcccgcttatttttctcgccgcccttgtaagctagagtggcgtaaccagaaataacctggttgtcatgaccagcaacgcggatggtgtagcttccaggctccttgtccaacttgatcatcgcagagtaacgctctccattgtaaatagagacttgatgggcgagctggggctcaatgtaatgtccatccacctcgtagatgtacatcgggtgctcatcaatggagaaaatcaatgatttgagacttgctgcactgacaaagttgaaactggcccatcgatcggtaggcgtcacttcaaagactgacctcggaccctcactgggaatacatccagagttcaagccctcaggaagcttctctgggtggtgctcccagtcaccctgaagaaccggcatgaatggatggcatctggtgggtgttagtggcttccaacccagtggagcaaaggatggactcaccccttatccgataaaggctcagttatgactgctctgaccttagccggctggagatttgtcagatactcagggtctttgcagtatacagagcctgcgccatcgatgagaatgctatccgagcaactggtaactgtaagcgtcgccctttaactatcatatttgggcccttacaagatatcatagcctgtgtctctaagagcatccatatactcattggccggcaggtggtcccagtcagacatcatgaccaactgggaatcatgagcggctttggtcatggccgcaatatcggcagggtcatcagagatcattgagaaaggcgattctcggtcggcagacggactaattctcttattagagccgcaagaaagacagtgttctgcatactcaccgaatacgaatgccaccgtagagaccgtccattattctgtctttgtcgtgggcatggtaccagtatgtaccataagtcgttgctttccactggtaccgatatttgtcaccaggcttgatagcccattgcgttagacctgatactccgtccgcccatgggggtgttcatttgcctggagtagttcagtttggtgcaattctctgggagtagtattgccggaggtcttactcaatgccatggaaatggaccgatgtattgaagggcaagttgttggtcacatctatctatttttcttagtatgaatcgagggggaacggaggatcagactcactgtgacttcgtctccttcatccataatcaatggtgggcctgggaaacgatcattcacaaagatcatctctctttcatgtccgttgggtgagcccctctgccaggtgaggtcgagatcataatgaaccttagctgcccggctaagggcagcagcgctcatcaaagtcagaaacagcgacttcgtaagtgtcatctttttcgaatgggtgggtgtgaactgggtattgaagcgaatgatttttcccattaaagtcgcgtctataacgtccctgtcagtcttataaccagactgcgttaaactcctgcatacctgcgaagcccccaatcctcgcattcctcccgtgttgaaaacagcaggcccttgcattagacattgttgccaaccacaaggacttgatttcggtctcgattccggtgcatgacactgatcgtattcaatcaatttccacaaatagtcatacccgggctgtaatagttgtatgactgagatccagaacttttatttagtcttgaatggaacggcggtcgaagaggtcatggttattcctgaggtcgctgccaatagctcatggaaccaaagggatcagaatgtgccaataagcataaatctagcttttacgaagtatttgtttttttactgaaagcaaccaagaagtagtaacaggtatctggctgtgtaaacagacgtacgtgtacgtcaaatccccgtttccgggaaatatcgatgccttaattcctgattttggccttggtgcctgaatgccgtgtccgggggcccgcgcccccgacgatgacgatgccacatctcccacccctcgcgggggcctcttcaccgatccccctgggggagggggtctatctcgacacaataatctaccaaatttaccctaaatcaagcctgtttgcattgctgagcatagtaaatagcaagatctacatcataggtaatcgtctcggttgttcttctactcattctgaatggtacatctttcatgctatcatactatgcactggtggttgacgtataactagtactcaaaacatgcgtgttcagaacaaaatgaataatacaggagccggcgacgcgaagcaagctccacacatacggcacgctcaagccaaggtatcagaaagttattaaccctgagccacgagaggcgcctgcgctgggttccagaatttgcgagcagccgcaaatatcatgtcaaccattccctggacctgctcaccactagcagccatatcgtagtctttcttgtgctccacttccttctcctcctcttcagtgaaatagctcaaggggaagtccaattcgactttgacggtcgcagccttgctagaacgccagcggagttcatgacgaaaagcatgtagtatccggggagaacaacaccggggtccggatagatctgggctgtgcaatatctgtaaccgtcctggtcatcctcacacgtgtgctcaaggggcacgcgtctctggtcggtgttgacagtgtgcgagacagttccgagacggaccagagatgagttcttgatatcagcgtccgcgaagaaacgaagtgttttgcccacggtgaccttgctgcttttgttcttcacgatgggagtcttaggccggattgcttccgttccgttcttgttgtataggtatgggggccggaagatctcggcgtcgtagtggttgacggtgcagttaccacagagaccgccacctccgttgagcactgtagcgtcagggaggagaattgagagactgtggtagacacggacgacgttgttcttctgtaggggaacgaaaatgtctctgtccgggtagtaaatctccggggtcaactggatatccctgtcggcttcattcaatggctggccccagatctcgccgccagcgatgaagacagatccatcagggagaacgacagacgtgtggaagacacgctgatagaacatgccgccagggtggttctcgctcttacttccattcaaaccggctagcaccaccttggccttcttgtagggctcatcgatggtgatgatgtgggcatttctggtaccgaaggatccatcgtagcgctcctggcctccgaaggtgaggatcttaccatgaacggcatcgaacataacgttattcccagacattgagtgttggtcgtcaaggcgataaccggcaggcacatgactgcctccccttgtacgagtgttcaaccagtgcatctcgaagctgggaccgacatggaagacactgccgttcttccagccgaacagccatgcatgattatcggcccgaagcggtctgtcatcagtttcgatgagctcacgatggatattgtagagtctcttccaggttcgtttccagggattgtagagctcgccgtccttagggttattcggccctccgctccacgaaccaccaatggcaaagatccgcccatcggagagggtagtagtggaatggtatccacggtggagcaccatgctctcaccgcgctgccagccagtgccgtcgaagattctggtcttgtccgagtcggctccaccaaacacgacaattcgtccgtcaaagtccatagagattccaggacagaacatatcgtgctcattgttggcaacactggcctggtaaatatcctccttgataggatccaggtagtcgtgaatgtttggccaccagggcaagcaaagaattgatcgtcagcccaagcggaccagaggatgatatcaccgttgtccgcacggttaattgcagtatgggctcctgctacgggcacaatgggcaagtcgagtgtgaagcgacaagagctcaaaactcgtcagcaagctcatgctgtttgcgttgtagaggatgaatttggagtgctcccatctgtgagctcctggacacgccgtcattgagggtaaaaataccgtataaggaatatccgggatccgagcggtggttgagaccaaggacaagaagcagcccggtccttgtcacggggccagatgcgagaataacgggcttaagggcggatttcgacaatcttggctcttttttttgaccggccacgtgtgattattttagaactgggtgaaggccgttatgacattgccaattctcaggctcttccgggttgccgcgctcctgtcaacgctgaaggctcaagctgatacaacactatagcactttaaccgtgatctgatacagttgtatccaatcaaacccggaggggccaggtctacggccgtatctactcgctatggttgccaaattgtcgtgggcggtctctgtttccaccaactctacagatccgcccttcctacggcaatctaaccgctagtgcggcatattagattttgtctgtcgtatactttgtaataagtattttgtacgtctgaatacactagcattacaccaactccctgtataagttcaaaagtagaggccaattctcgcgtgtagaacccctgaagattacattttaacgatatgtatatggactttatggcggagcaacatgagactgaaaggtatttgtttgcttctgaagtcaatatgtacatgtgtagttaccatagtaatttggtccgcacaggatgtcaaatttcgggcagttttcatttcgggagaatttcaccatgatttttactagtacgcctgagacagaatccagaaacctactatgaactgcctagtacatatgtgatatggaatattccagttagtaactttggaaagccctggaggaccaggggaagttattaatgcttcgtgtgaccctatgacttcctagcctcgaattagaatagccactcgaactagtatgggctggtatgtactccgtacttgcatatgtatgtaggaagataccatatgtgcattgactgtttatagaagactcttttaccaacaacccgaatgggattaaaaggatactcgtataggtaaccatagatggtacgtgctatgtacaatcaagtgattgagcagcccacgtgctccaacccctggcatttcttggcgccatgcttgatcaatgcccaggtgtcttatggaagcttgtaatagatggaaccatgggttaccatgactcgtgcaggaatgattggaccacatccattaaatagcttcggaccaagggccgagtacatacctaggtatcaggcctttttctacacttggacagccctggagattacgccaagactcgttttttttttagctcgacggcccatgcgtttagctacatagtaggatactatcgaggtatctgaccatcaatgagattcaattctgggagcactcttgaatgggccggctctatgattgggtgtctctttatcgtgtagtgtggacagtgaaatgagagatgacattagccttaccctacctaggtaggtacctacctaggtacctagtctgagacatccatgggatgacctaaggttaggttaacctactatagaaaaatgtcatattgaggttacgccttcctcgacagataagataggtacctaggtagcatattaaaagactcaccctcacctttttctcttccttttctcttcctctcctctgtcagaggcccgaccaggaagtgaaccaaacagtttatcttccttctggaacccaaaatggctgtctatcacgatctcgactggctcttcgctgtcggtaccctcttcttcattctctctgtttggggaatcggtgccaacgtatgttccttgcattgaccctcaactgatccagcactcatctctttcctttgcacaggatgtagccaactcttacgcgacctcggtcagctccagatccctgaccttgatccaagctggtatcctggcgactatcaccgagttcatcggtgccatcgcccttggacaacaggttacctcgaccattcgcagtggtgtcttctccgtcgaccgcttcttggactctccaggagtgttgatcatggccatggtggttgctgaagtcggtacgtttctctttgctttctctctttgccttccctttgcgacttccaagtgaaaggcctcaattactcactcctttgtctaacgatacaggctcctcgatctggcttaccgtctgcacgtacctcggattcccagtgtccaccactcaatccattgtcggtgccctcatcggcgtcgccattgcggcagaactccctgtccactggggttggaagtcgcagagcgtttcccaaatcgctgcctcttggggtatcgcccccctcatctcagccgcattcggtgccatcatcttcaccagtatccggctgctggtgcactcacgtgaggatcccatgaagtgggcgttgcgcgtgcttccattctattacgccattactgctgctatccttgcattgttcatcgtcgtcagcggtggtcacggaatcccaaagctcgaggtcttgggtgcaggcaaggcttgtggaattgtcattggcgtctttgctggtgtctgggttatcagtgcggtcttctttgttccgtactattggcgcagccttgtgaagggtgactcccgcctgcgcttctggcacatccccatgggtcctcttctctggaaggacaattacaccttgtacttccctggtaacccggacaagagcattgtgcccaactactatgaaagcgacctgaagggcgagacggacactcttcgctctggctctgccaccgagggacaagagtccaccttcaccactccagaaattgagcccctcaagggtgatcccagcgcttccgggaacgacgcccgcagggctgacgccaggattgcagagaaacatcaaaaggagcttcaggctttggacacactgccctggattcaccccaagcgtatctttgccaccctcaagcttgttttcacttatggtattacccgcgatgtcattcaccaccagtcaaagggtctcgatcatatccatcagcgtgcccctgtctttgacaacaaggttgaacacctatggaccactgcccaggtttgctctgctatggtacgctccactcacctccccctctccaacccccagctaacagtccaactagatcatgtctatctcccacggcgcgaacgatgtctcgaacgctattggtccattcacaaccgagtacatgacctggcactccggcaaggcttccaccaagactgatacccccatctggatcaaggcggtgggtggtctcggcctcggctttggtaagactcccttctccccgcctcccgtctcgtccatacattcggcatgctaatgaacaacaggcttctggaccttcggctaccacatcatgcgcagtctcggtaaccgcatcaccaagcacacccctactagaggatacagctctgaactttctagcgcgataactattctccttgcgtcaaaattaggtctgccggtttccactacgcaatgcattaccggttctgtcgtcggtgtcgcgttggttaacatggacgtcaggagtatcaactggaaacagcttggcaagattttcctcggttgggtcttgactctcccatgtgccggtctgattagtggaatcatcatgggaatggctctgaatgttcccacctggggccgttaaatggtcaaatgggttgtaatgccgtggatattctaggggactgaacgtcccttttagacatcacgtgactcgccgaagtttagtaccgcattattatttcggtacgaggaataactctgcaataattactgctattttttttctcgtattttctactcaatcctagtccacaacgtattccatacgcgaactatgtgtcggcccgcatattcattttgcattttgctttctctgtgcagtagccaccatcacttgcttccaggcttggccactgcttcgtaagcccaccatcggttatataactaattatatcctattttttacaatacacactcgctttacttttctatctacaacatagttaactatctaactatataactagttgtagtattagttcagtatagtgtcatcgctctttatgcttactgtctcgtcctagcctaggtgccctagttccttcctatccttcagccactggaaaaattataaataccctctccccccgttttctctcttcttcttcttcttcttcttcttcttcttcttcttcttcttctttctctttcaacccctccaacaaggggcccgacaagacttcggggcctacctacgaacacaacatcaggcccctctaggcgggggatcgccacttcccggcaggccccgtttgctgccaaccgtacgccgccgccagccaagaagaacccggcgcgtacgccacctcgagtcaaggaggagcccagcagcggcccacctgcgcgtgccccggggcgtcctcccccgagaaaagtcgcccgaaaatttgaaaaatcttgacacggcatgataccgcggagttctttattttcttttattaactaataccactatgtatcccgatgtccttaccaatgtctattatcatcatcaaattctattatccttgagaggaacattacaagaaacatcgttcaaatgtcctgacattctttcccagctcttttggctcatcaagggctagttaaagcttgctggagagagtgctgaaggctctggatttcatcacgaaggtgtcgatagtagatgaaaattctacgctaagctctgcgaaaagctcttcacgaagctgttgaatttgatgatgatatattttgacgaagatcaggtgaggaagcaaggtgaaaaaaaatcgcactggcaccttatgcttgggaagtggagaaaggaagaaaaatccggggagggaatccggggtggagtcttgataagaagggtccagacagtctctcgcactcagcttgctgaaagtcccggagcagcccaatctctagttcacgcacttgggtacgccacgtcaccgagctgtccataaagagaagagttgcttcgaagccgagagtgtactcgcaatgagacctctgtacagcttgtatgaaagcttgccgatactcactacaggtctttgcagagagggtctttagtataatatgacgagccagatctacaagcaagcactgagagtagatgcgaagctagagagtgcttcaattcaagatactactttccgggatgatagtaagtatttatataatgatgaagcagtttgatgatgagataggaatacataaaggtatcaattaaaaaacaaaagcaaaagcaaaagcaaaagcaaaacgagagcaggccaccggatcgtcacagatatatggtcgtgtcagtcttttttttttggtgtcttaggaggagaggacggtggcagcgggactccaatatacgccggagcgggcggcattgggaggtcatcctccccgggcgcgttttggtcggcggggggagcattgcgagcggcccagggagcatttggcggcgcacaggcagtgaagggggcccagcgggaactagcgagccctcgccgagaggggcctgatggagtaatggtaggcaggcccctctcggccagttgggctgcccgggtgtggctgttggagtcacgtgatcatatatcccgtgatccaggtttgcaggactagcttgcttcaccttctcacttcttcttttccatcatccatcgatcatcatcatcatctatcattatccatggagaggagtgtctagatacctgaataccatagtatctatccacttctgtccccagactggcccgcgccggagacgctgagcgccgttgcagttcgaaggcctgctataatcttaattagtaacagcttcattgagggaacaagaacctcataccttgccaaagtcggccatgaaggacaggtattcgtcgtcacgccggttttttccctacttatagttagcgtgctcataatagcataaataagaacttatcgacacatattcccatccggtcttcactttccccatcaggcaaggtaaaccattcttttagttcgggcgtatccttttcaaacaactttcgtaccaccgggggaatcgcctccatcagtggtcgtgtgatccagtcaacgttgactcgacacaacagtcgccagtaggacaggctcaaaggcctttcgcctgagtccagaccgatgatgttgttggctctgctgtactcttgcagatactgaatcgtagctcgcattgtcatccatagtcgaccgaagtcgtcaatctctgcatcgtcctggctatcaggtataacaatctccgggtcatcctgattgttggtgatggtgtctccctcactgataatatccacgtctttcccttctggcccgatgacgatgtcttctaacacatctccgatctcatcatccctaacatcgccctctggatgacgacctttatcatcgacgtggctgcccacattgatttcagaggcgacttcaccagatcgacgtatatcactcctcgtcctctctccaatcatctcctcaacttcaccggaaaggttgttgatggtcccggggggggacacacgcagggaacgaaccattgtggttggaagagaaagaagaagaagaagaagaagaagaagaagaagaagaagaagagagaaaacgggggggagggggtatttataattttcctagtggctgaaggacaggaaggaactaggacacctaggctaggacgagacagtaagcataaagagggatggcccactgtgttgaacgaaggaagtactatagtgaactattagttactacaactatgcctatagttagatagatagaaaagtaaagcgagtgtgtattgtaaaaaataggatctacttaactatataacccgctcggtaaggaaaaaaatctatacaagcaagtattgttgagatatgcagttgtagctcatcgcatttactatacatacatatttatgtatcatgctgcgattaggcttcaacactaaagttacatatatagctataaaggctcagtattcatcgtcacggtcacgccgccgttatttttcctcctatttatagttacgtgtttatgctattgtaaataagaacttatcgactagggccgcctcgaaagaatcgaggtgatagtataacatgttaatcgatgataagaatctatcggaattgataggaatccataaaagttttgcatgataataaaagtggtttgataaaatagggacatatgaaggtatcaataataaaaaagtaagagaaagatgaaagtaaaagcaaaacaagaataaggtaagaacaagtcagcggtggtgagagacatgatcctttgttggaataaaatacggcattattccactcgaccaacacaaaaaccaaggttaatgtatatagcctaatggaggctatatcccagttttgacctccttttttcattttctggtgtcttgggaggagatgatggtggcagcggcactccaatatacgccggagcgggcggcattgggaggtcatcctccccgggcgcatgttgggcggcggggggcgctttgcgagcggcccagggagcatttggcggcgcacgggcagtgtaggggccccagcgggaactagcgagccctcgccgagaggggcctgatggagtattggtaggcaggcccctctcggcgaggtgggctgcccgggtgtccacaggccttttgttggaggccggggggggagggggggtcatgtccggcagtttctcccctttccacgtgatcctccctcaaagatgatgggggcagcggcactcgaagataggatggagtgggcggcatcgggaagtcatcctcctctgataactgtgggaggtctcccagagtgggggttatcttgaagggcgcgcggagctttttgaggagcccggtgcgcgttttgggcagcgggcggtgcctttcgaggggtcggcggagctttttgaaggggcgaggggagcatttcgggctcccctctcggcgagggctcgccaattcccggtaggccccgtacgccgcgccgcctaccgggcgccgcttgcgccgacggcgccgcgaaattttctctagctctaatagtgtgttggtaggcaggcccctctcggcgagctgagcggccctgacgtcttgtcgggccccttgttggaggggttggaagagaaagaagaagaagaagaagaagagaggaaacggggggaggaggtatttataattcttctagtggctgaaggacaggaaggaactacaacatagggcacctaggctaggacgagacggcaagtatgaagagtgatagcccactatctacccaattctaggttctctcactcattgctctagtttctctcactcatcttatgttcacctttaggtgtcaaattatgacctgcaacctagttacaacctatatgtagcatgagactttcgtatcatatgccaaagaagttctcactgtaattgaatgcaaaatcagctaaatcaatattatttaaaccccccatttagcagccttcccctatagtatctatgatgaatttactattcacagaatcctccccttccgctgtatcttctgcagcttacatcctctttttttttgacttctttgctgcaagaaatgcatctatagtcgcagttgcgatccctttttttttttgcctgctagctcaatttcttcctctctatctgatctctcgttttagtataccgatttgtatcatatatagacaaaggactatctatattaaccctacgcttacttttaccggtatcccggcgcttttttaggtccaaagtgttgatattattataagctcccgcttccactatagtaagcgcactagtcaaaaaacggagctaattgacggcgtagcttaggagaaatagtataatttcatctccaattacatcggtttttttcatgatcttcttagcgtattttcggatgatttcaagtgtatcaatacaacctcttgctcggcatttagagctttgttagcgccagggtggccggctttagatttacgaccgttgattctaccccgtaatgtatagtacggaacgtcgaattccggcgcccagtttgacattttagggttatctctctcaccgtatgtagatatagcagtagcaattctatcttctggattttgagaagaaaaaggcatttttggtggcagtaaattgatgttaaatctggtgaaaatttgcattgagcccgtttttgcattcaacccgtgcggcctatcgtgtaatagctagcttagtctctcttctctttctctcttatcaagtgggagtctctagatacagaatacagtcgtgttgctccctcttctcccacccttacaataattttgcgcttttgctaaccctgaatatgtctccagaactacagcaaatactagcaataatagcactatggatattctattcacgagccttccatggctaacatacacagaaatcgatatatcgttaaatcttttaaatctttcatcaaacccgcaccagatggcataaaccccaatgtcaaatactccaacccatcggtacatagggtctgtcttgtgagatgataaatgatagtcatcaccactagaccaatcccactaaagcagggtcttcatgtcatccatgttacggacaccatagaggttaccagccttgacacgcttgagcgtcagggccgcaatcagcgcagcaccaacaccagaaccatcctcagcagccatgatggaaaccttgtccttctcagtaggggcccagtcgaggatctcgcggagtgcctgggcaccgcgctccttgaagtgggggtacttggtgaagacggagccgtcggcaccgacgtggcaggagtcgatgttcttctttgtgcagatggcggcgacgccgcaggcggacagacgagcggcacgcgtaccgatcagctcggcgagacgacggatcagctccagctctggctgggtggggcggatgttcagagtacgttcgaagagatcgagtgtctctgtcaggttctcgtaggggtcttcttcgatgttggcgaggaaggaggcgtcgaggaggtagggcttgcgaagcttggagacgtcctggccgttgaagatcagaccggcgcggttgtcgatcaggtcgaggagggcgagacggaagatctcgcccaggtacagtcctgcggtcatcttctcgaaggcttgttggccggggcggggtgagtcgcgatcgatgatgtcatcgtatttggtgagggggaggaccacgtgctcgttgtcgaaggcgccgtattcgcagttgatggcaacgggcatgtcggcgggcaggttcatgtgcgcgatcttgggtatcgaccctgcgttctccatgtatgcggcgttcacgccggtgccgaagatgcagccgatcttcatggcggagtcggtgtaagaggaggcaatgagggtaccggtagtgtcgttaatcagggctgcgactttaatgggaagaccctgtggcatggttagtgttttgatcctttgtggaaaggatagcataatctcaggaatgtcatacccgcttcttcaggatctcctccagagggggaacaacatcctggccctcgacaccgtcaatgtcgaatcccttggtccagcgctgcaggataccgtgatcgatgtactcctgggtggcggggtaggagaaagtgaaaccgaggggcagcttggcgaggtttgcttcctcgtggtgggcctcaatgaactgctgcaagcagtcggcgatgtactcccacaattcctcagcggttccagtccgcagctcctcgggcatcttatacttggattgtgtgatgtcgaaggcgcccttctcctcggtcaaggtaatttcgcaaacacgtaggttggtgccgcccatgtcgagggccaggtaggttccccgttcgtgtccatcggggaagtccaagacccaggtgacgttcatgggctattttgtacggtcagtctaggttcagttcggaggaataaggtcgttctcacaatgttgccgccctcaacggagaggcctgttttttgttagcgacttgttgaatcggagagctgcgggataagtcacctttctcgagctccttgacgaagtgattcacgatctccttgagcttggagcgatcgactgtgaaagccttctcgaagtcatgaatgggtcccaacaggttctggggcagttcgtgcatggaccctataccacattagtttaataagggcagggggtagcttggagagcctcacccttgcgggactgcgggtgcttagggccaattccaaccatggtgatatgtagtgtaggaaaatagagggaaaggaaaagaaaaagaaaaggaaaaaaggtgggaggggaagaatgacgatatggaaatcaacgtggggcaacttgtagatgtcttgttttggctgtcggagagaaacgaggaaagtcaattggggcttggaggggctatgggggggaaatacggtcattttatagacagtcggactataaatattctaattataattataaatagcctcagactatctaaataacgccaaattagttgtttacagaaatcaagggcgtgttttttttactgcaaacgttatgatcgaccgagatcatctcttggcacgattatccgcgtataacgttatactacggagtacctacttagtatgtactatgctacctacggagatatctacatacacctacaacgtactaatcaaaacaatatctctcctatttctgcttcaagacatttcatgaaaatcataatctcaatgtgacagcttacgcgccaaatgggggaaaacatggtccagaccctcagactggcggtgtgcctcgtcgtgtgacagcttctcgcgtactttattctgatacgcatctgtcaaccccagagtccgatcgacttcctccgttagtcggtccacttcgtcctgcagccgttcatcgcgggtctgtagcggggcattctcctccgcccgtttctgcgggtcggggttggtttcctcccacagcgcctccaactcctctccccatcccatagcctttgcaaacttgcgcactccagcatcacagtccccaatcaacagcacatcgtcactccgcgatccaaggccaccgacacgctccatgttgatgagcacgcgaggcacgcccggactaaccatcgagggcagactggcaaatggctggacggacagactagttcccatgacaatgcaaaggtcagcctcttctggcagagagcggctgtcaaagaagtccgatggtagagcttcgccgaagaagacaatgtccggcttgaccaggccgttgcacttgtggcagtggggtacatcgcccttggataccttctggtgcatctcatcatctgggaaggtctccttgcattcaatgcagcgctgtgtcgcaaaactgccatgggcctcgacgatcttctcgcctggcacgcctgcctggcgctcgaggcagtcaatgttttgagtaaagtgcttcaggagcatccctttctcatagagcagtttgatgaatgagtgcacaatggttgggcgatagcgtcctgggtacagctcgtgcgccagtgcatagaaaggtttggggttatgccggaagaaaccaatgtcaaagactgcctcgggctccggtaaatctagacttgccagattggcgtagattcccgtgtcaggtgagcgaaagtccgggatgcctgcggaagtgctgatgcccgctcccacctacatgcttggttagcttggatatactatttcatggggtccacgcgtaccatcaccacaattttcttcacattgtgctgcttgacatatttggccactgcctcgatgttgcgcgcctcaagagtcaagggggatgcgaattcatccacctgggtggatggttcgttgcccatgatgcgccggtttggacgtctgggtttgcgacgtccgatgatggcggttaaggacttgacaggcaaaaggtcaagtcttgagacttctagataaaagtagtcaaaagatcaacagagaaaagggaaacaggaaaaaaagaagagaaacagtaaaagagcaactgatatgggatcgtgagcgtgggggaaaatgacgtcgagttgattcaccacattaagacgcgcgagatgaaacaacaaacaaagtccaaagaaaaatagttcacacacgtctggcaagttctatttgatttatcttggagtctctcaacccccgttgacctttttgacgtagcacagcttgaagctgtaaaacccactctcaccgcccgcgattcacccgtcccccctactggcatcaacaatcaacttgcgacgacaatggcgcccagaatggctgcaaccgccaatgggcataatgccatgccccagagccctccaaataccaatgtcccaccaacagagacatctccccagcctgatatcttcaacgccagctccgtcgccgagatcaaagccacgttgtcccacctgcatacccaagaagcgtctgtgaccgcccgcctcgatgcactggtaacatcccagaaagacctctcccgtgaactgggtcggctggacctgatgcgcgccagcattggtgcacacgccagcacgacccgctccatcagccacggaatgctctccgaagccgccggcaccgctgaccggatctccaatgccgtccgccggctggatctcgagcaggcccgggtaaaagccacgcttgaggttgtcgagcaagttgccgagctcaaggcgtgtgcgctgggcgtggcgggatcgatgggtgcgccccaggactgggagaaagccgccagctacctacaccgtgcagctcaggtcccggcgacggtcgtcaatggcgcgtttgctgcggagatggttcctacggctgaagtgccggacccgccaagtgtgacgctcgataatgctgcggagtcgctgtgtgggctgttcctgcgtgagtttgagaaggcggttaaggagaatgacggggccaagattacgcgcttcttcaagcttttcccgcttattggtcgctctgaggttggacttgatgtttatggtcgttatgtgtgtcagggtgttgcggccaaggctcgagctaacctgaacggtgctaccgggggtgctcagactaaggatgggttcttctatgccaatgcgcttaccaggctgtttgagcacattgcgcagattattgatggccatggcgggctcgtcgagcatcactatggtccccgcaagatggggcgggtcattgaacggctacaggtcgaggctgatgtgcaaggtggtatcattcttgatacttggagcgatgagcgacatgtggatcgcaaactgatggatatcaaatcttatgccttcacttttttggtgcagagcttcctacccgcgcagcgaccaggtccgcctcgctcacaatctcctgccgttggggcgagcactgccaccgacgaggaaggggtggatatgaaagagatcgatggtgtcttgaatgaaatggctatcatgttgggccggtggtcactgtactgtcgattcctggctgatacgtgtaatgtgagtttcaatctccgcctctttaataccagcactaacaacttctctagtcttcgggtgaggatgatgcagacgacgataagcgattcgagctgcccagcttcttgcgagagtcacctctggcccagaagatcaacgatcgcctagtggccccattcaacacaatgacaacattcttcttccgccgctctgtcgagaaggctttccaactagacgagtccccgtcaggcctcaccttgaacccccagcgtccactgaaagccgacccaccacatatcacctcagccgtcgacgacataatgtacatcgtcaacaaagtcatccagcaatcactcgccacctcccaagaagcagtcgtgacaaacgtagtcccgaccctgtcacgcgtcctaggctccgatttcatcggcatgacacagcgcaagatgcgcgacgagtgctacccacgcgccccagtccaaggcggacaacccgccgaacaaaccacaatctccttcctagtccaaatcaacaacctcgacatgggagtcgactacatccgacgaatcgtgcaaaacaacacgggctcaaaaccaacagacacaaccaccacagaagcaaccccgcacctcctcacaatcttcgcaagccccagcgcagccaagaaagtccaccaaaccctccaaaccctcagcacaaccttcgaaagcaaagtaaccgacctcctaaccgacggaatccaagtaatcttcaacaacgccataaagccgcgtctccgcccaattctcgcagatacattccgagacatcgaatacgcaccaaaccccaacctagaagccgactctccgaccttcgacaaagaactcgtcaagccgcgcttcacggcctcctggaacgacctcctcatgccattcgcgcggatcctgacgccaaccgccttcgaccgcgtcctcggcgtgacgatcgcgtatctggcccgtctactggagaagaggctttggtcttacgggtcgcggattaacgcgctgggcgcggcgcggcttgagagggatgttgcggggcttgttggggctgcggttgatgttgggtatgttgctggtgcgccggggaggtatcggtatcgggagagttttgcgcggtgtgtgcagatgatgcttgttatggggatggatgaggatgagtgggatgaggttaggaggggtggggttgccgcggaggttgttgagaagcttgggagggaggatttgattagggttcgggggatggttaggaggtagggaggactttttatagattgggttttctgatctgcatttgactgtttttttggtttgtttgttttatattcgggtttgggattttgttatatcttgttctggacaaatgcatgtatgtagactggcagcagcaaggtacttccatattacatatctaccatctacaattgcgcaaagatttgagaataaagtcttagataataggtaaatttgtatcaggatgtatcgctctatactgcagacgcaaaaaccagaaaacatagacagaagcaaggtatttcccttgcaattcaatgaagcagcttgtgtacacgtacgaaacccagtttaatatccccgtttgaccatttcaaaggccataaaaacatagaaccatggagcgccaggccaaattagaccataattcaagttgtttttcccgagggaggtgtagcttggtttggaggtggggaggtatgttattgtagcgtgaggtgaggtaaaggtgaataacggaggagatgttggatggtagggtgaggtgtggtagagagttggtggtagaggtatcgaaagtcgaagagtagatttgaggtatagcaaaagccccaggcttttgtcgcaagaaaagaagcacgctcaagggatatcgagataaaagaagcgaaaacgagaaaatcaatgcttgctggacggaatggcgtatgcgaaatgtatgccatgcaaacgagatgcagggaaaatgtgtgggaaaatggcggagagagtatgattagtcctccgtcttctcttggaccggtctaagcaccacgggttcggcaccctgtgtatcgggagggtgctgttcagcgagctggcgaggagcaggagcaatcttgacctcgtgcatagcgatgtcgccttcactggtaccgcggctactctggctgatgtcaccattgggcgcgtggccctcgagcatcacctcgcgcggcggaccaccgagcatcatctcactatgttcgccaatgccgtagcgctgcgcggcggggacctggtggccgtcttcgagctggtcgtggttttgcggggtccaagcgaggtagtcacgacggacctcgacgtagtcgtaggcgaactcgcccagttggtcgtcgtccataccgagcagctcagcttcctcggaggcgcgcaggttcagacccgggatggcgttgattgcgtaggcgataatggcggacatgacgaagctgtaggaagcggtagcgacgatgtaggcgatctgaatgtacagctgcttgtagttgtggatgacccagccaccgacaccggttccggtattgacaccgtccagaccaacaatggcatcgtcaccgaacaacgcgttgaagatcagcccgacaatgccagcgataccgtgctctgccaacacatccatagagtcgtcgatccggatccagtacttgatcttggtggagtagttgcaaacgatgccggtcacaatgccgaggatgacactggcccagggagagatgaagccggaggcgggtgtcgcagctaccaatcccgagatggtaccggaacaccagccgaccatcgaccacttgcgagccagacgccaatcgagcaaaacccaggtgatggccgcgaaggcggcagtcagattggtgttccaggaggccatggttgcgcgcaggttagctccgaacgaggaaccaccgttgaaaccaagccaaccgaaccagaggaaaactgtgccgaggaggatgagagagacgttgtgtgggcggaagttgagcatcatgcgctcctgtcggcgaccgaggaccatggagtaggccagagctgtgaaaccggaaccgatttcgacgggaccaccaccggcgtaatccatcacaccgtacttgaatgcccaaccgttgacgttccagacccagcaggttagcggacagtaaacgatagtagcccagaggaaaacgaagaccatggcgggaagaagccgaccgcgttcagcgacagctcccatgacgatagctgcggtgacaccacagaattgcatctggagattaagaagtcagtattggtctgggtacacaagaaaccacctgggcagttcaatgattcccaatgttcgatcttacctgataaaatgcgtagagcaagttaggaaccagtggagaaccggggctcggatcagccaatgtgttcattaaaccgaagttgcgcaagttgccgataaaaccgttggtcgcagtcggggagaaagcaagtgaataaccccagaaataccattggaaggtcacgacggacaaggaagccatacaggcccagatcatgctcagggcagactttcggcgagccaatcccgagtacagaaagccgagaccggggatcatgaccatgaccatggccgaggccacgatgatgtaggcctggtcgccagattgaaaccatttgttgacattttcggtgcctaaataggaaatgagtgttagaccatcattccgttaagacaggaaagactacatacgggagtcaccgcccaagtctgtgttcgtcgagaggtcgtagttggcaggagctccgatccagttgtaggaggcatagtccggggcgtacggggctttcccgctgaacgccattgcaatttgagaggctcctttggaatttgaaaacgtgtttaggggtatagcaaggcgttcaaatgtgagaaagaaaaaagaaaaaggaagttcccgaagttaaggaaagaagaaattcgccacgaatataaaaataaggaaacccgaactctttcgaaccaaaaaattcccagagataagtcggatcgacactagtgggtcttcccaggttgtcaaaagcaaaaagcaaaagtaatttgacaattcaaatgcaattccccctagaatgttgtagataatgggagtaaaaggatgaaaagttaaatgggaggcatgaaacatgtagaaaatagaagaaaatattgacaggcgcggttagcaggagaaaatcggagataattgaaaaaatgcttggttcaagtggttcagagattgtgacaatagcaatgggataatcccgataatactatatccccagctctctctctctctctctctttttttctatgtttccaatctttccaatctccagctctgactgtataaggtttttccttttgattttgattctgtatagataattaacacaattgacacacacattgtcatcaacctcgtcatccccggcgtaaacagctgcaagataatgtggcaagggatagataagtatgggtcttctcatgatagtccaagccttggccttgctttgatggagattacatgtagattatgatccatgtaccattcgtcagtgactcgactccggggaatagttcctggggatttggggaagtagattccactccctctgcaggacatggggtctacttcttatatctcttcatcattctagaattcttcatctaaataagatagctagatagcttatcacagatattctgcagggacttcccccccttcctgtataaaatagagtcgtggagttattctggagaagagaagaaggagcttatctttcactcggatatcagttcaaattccatcaaattccctatccgccaccagcaattggatgagtgacgctgggatcccggggatgtgattggctacagataaagtacttcttgccactcgcgctaagtggggctccgctgtaagataagcctttcccatttggggttagcgtgtcaaagtgggaatgagccaacgattggcgacagataaggtcccggcctctcttggctttccgttttttcccgatccccgggtggaatcttcacttttatctgtgtcggccgatgccggagtcttgaccctatctatgttgttataccctacttgatttcctctcttcttttctctctctatatttagtgctcagaccttggtacataggtacgcttggatcactatacattccatttggctaagacttgtaatagttctatacaatgactttgcctatcgcatggtatctagaaagaatgattctattcaaagtactgacgaggctagtctaggcccccataaaaccattgggtccacaggtagtcgtgtagtttaataattacctgtcgcctacaagctagcgcggaaggctaaagccttttagtgcctaaggcaccatagacttacgccacgagtaatttggtaatctagccgtgcattcctttctagtttaggtagaactactaattccctagactagagatgggctcgttagctctacccttagtagctatcactagagaatgacgagtagtaggcaataggccgcggtgaaaagtctgctattatagtaccgaattgcacctagagaacccgatcgccgtgcacaagcttaaggccgagtatagcattaattgaaatctctttctataaactagataagcgctagttaactagaggctttataagtaaaccctaatatgtctgtatttacgttccttagcgatagtatacgttcgcctctcaaattaggaccgattagccaggattagtctccccatttttctatgtagccagatactgtacgtgttaggtttcttggtcaagtcatgtccatcggaatctttgccaaatttaccaccagcaaccgcccaagcatgctactaagtatatcaaagttcccccgattatactgaaatgatgcgcaatttcaatcgtgacaagaagaggtgcgggatgccaggtctttgggggcgatttctgaggtaagtcgaggactcgggcctaaaccaagagagtagggacgaagaagtagtcattgatacatagatggtcgttactagataaataaaactggggatgctcactatatattatgggttgttgaactcggtgaaaaaggttgcattaacatctcatcgaatcacgatacaatggagcttcaatattttcaaaaaaaaaagaaaactatgtatgagatttctgagcggaaggtgcggacgggagagaaaaggaaggaaagagagaaatcagagctaatctatctactaacccaggttggagcaggttctgtgccatgtgatgccttgagacaagcacttttgcctaccagatcagacatccaacaatatcgggaacctgaaccccacaggcgggcttcctaagccttctgtatcaacattgcctctgcctgaagaagctcgatctgcacaagaccaccattttgaacaatcccttcttccctttttgtttggccccgcaaattacctgtcctgggatccaggctgacacccgaaacgttgatgtcgctcttggcattagtgccagggccctggagcttcaagatttctatccttgttcctggtttccaaggggtatctatctgcacttttcgctgacgtcgggtaccagaagaggcaaaatcagggtccgtcgtggacaaagtcgaggggttatgcaacccgtgggtagagttccatactcccagatctataaacacgagcttctcgagatttaattgttgttcgcctgcaaatatagcatagccactgaaatcggaagcatttgcggctggcaaagcggctatttcccaaggccgcccattgttgcccgctaagacatgtgcgaggaaaaagtgcgagtaaaagttcgctctgatcccggcggaaaggtcctcacccttatagttgtagggtaatggcgtgaaagctgaatattcactctggtggcccagatgaaaaaatacctgctcgataccgatgctcgctgctgtcaggaccagatctgttccccacaaagcagcaccaaaagtgtcgctgatgccactccttccactgcaagaagcagagttagtctcaccgaggacaagtgaactgttagccgctcgagcagcggcctcttgtgggatatattgggaaagattggtccaaacgacttggtggtctgaaagcaaattgagagagagtcggctctcccgtgctgcgtcgcacgtcgactgagggtagaggtgaactgcgtaggttcgaataatgctgggatcaaccagtccagcacgagttacattgataatatcaaaatcgtcgacctcatcctgctgatccgggacccatggaggatctgcaaataccgctgcttgaaagtgcggcttctgcttcgcttgcttgtagaacgcggacgacaggatttgatcggtgagctggtaccattggcgagtatattgctttgtgtcccaacccggttcacgccagcctttggagatgtaatgatcgatctcattgcccagctcaaagaaggagagggactcgccaaggacgttgaccgctgcttcggcttctttcatcgcagttgaccaagagccagtagtgttacgtaggttcagcgtgtaaataaaatctgttctgcttgggaaatagtctctccagccggcgaaccagtctttgcgaatacggaaaacttccacattggtgtcatccggcagagcagatgacggcgttcccaaactgggctcgaattgcgtctggtctgcgatattacctccgactctgattggtgccggtttcccaataatctcgccaatgttcttcaatatgtttgaggtcaagttgctctgtatatacggatcaacggaagagggttctatggaatagccatagatatcaggcctaaggatccttttagagctatcgagtgggaccttaatagtagagaaaggggaggctagaaccacttgtagcaagagaatgaatgtcaagatgtaggccatcttgacggggggggggaaacgtttgccaagaatatgtcatgcgataaaaataggtagatgaagcgccagtccttgttcaagagcaaagatgggttaaataaatccacaagatatttttcagatcgcggaacaacggcaattgaaataacggaaaccaaggcctaggaagagcccagcggaacctacgcaccaaaacctacgccccaggcttccggtgggggcggggccccgcgttacaacgatataatcgatcgacatgcgctcccgctcagctcggataactcccggagggaacgcatgacgtagcagatgcggagacaatctggtaatctttgaagacatggcttttcccggccacttagcggttagatagtcgaaagtgaagaatattcatggtcatgggctattgacgttttattgcaaagcagtgttgttgttattccacattcagtcaggtgcggtgtttaatcagtgctattggtgcattttgtatccccgggtagggccagagtatgatagtagcgttgcaatcttacgaagtggagtgacaatcggtggaccccagccaatatgcctctatagcttaaatacctcacttcattatcctagaatctacctaggtaggctcaggctcccattgtgtgctttcaaggtctagaaccttcatggtcaattgtagaactcggtgagcttcgaggaagggcattgcagcgttatactggcggtggcattgcttagatattagtccaattcttctgtaactaagccccacactacattggcttaaaactacaacacagcaggctatcgctgcaaaagaaaaaggcttgaaagagagccctgccaaatacagcagcagcaggagtcagcaaagaccactatacagaatcaggtctcatagaacaatatccagccagtgttgcatcagatggcgagctgcatcttacctccggagtgatccatgggaattggcccgatcaggacggcccggccctggcccagaattctccacatcgacctcgggagtaattatccgcttccaaggttgttgcaaggtcgcactcaccagacaccggttctaaggtaggcagctacatacctagtgattagaataattcgtttggtagaaggagccaaggctgcaagatagtgttcgggagagagaatgtatttgcacaagaaagatagctagatctgtggaatgaggaagaccgcgaatgggtagtttatggcataattggtcttaggggattacgaagctgatatctatcgaagatattgatagaccttctgcggagattttgttatggatggatgtcttgatgtcttcggcaccgacccctgtgtcccattactgaaagaggtgtccctctactaatccccaatatttatctcgaaataactcccattcttctggcgcttgcaggcttccatcgagtttgttggaagcgcttgaggtgtttgctttcaccgttgatcatgtgacagattcacccttggacgcttttcaggtggctgttgaacaccctccttatagccctccaaaatgttgggacacttctggagatgttgctcggcttttcatgaattactaaagtactacctctatagttcttttggcctctttggtcgcatgttacccttgcccatcagaaattatttgttcacacgtggaaagagtgacgatattgagaggtgcagacaccccttagcggaaaatggctctcctgccgtcgcaaagaacgacgttttggggtcaagtgaagaatatcgagctgtcttgccaggcaaaatagcagacccggtcctctatgaacctcagctcggtgaaaccttgagccaaggatcgacttcattgatagtgagactaaaaccgggtatcgttgtcaaatgccctagatattcgtgggggtattgcggagcggcggacgcgtcctcatttgtcaaggacatcaagcgcagtttcgaggttgaagaacgacttttcgatatattagggacgtaccctagaataatatggtatgtcagctaaacgccaggcggtccaattattaatgttatttctactatagctatatcggtatctctgaggaacctcgtgaattgctctttggcgaagctagcgatggtaatctgcaagcttacattgaccagcataatgatgctatcgacctatctcttcgtttgaaatggtgttgccaggcagcagaagccgtccactatatccaccaaaagggagtcattcattccgacttgcggccagagaatttgttattacactccgattccaagagcaagctcaatcttctactatgtgattttggagggtcgacgaatggcgatatagatggtggccatctccccgactccggctttttcaatccgtgcaagccatgggtgtcaacagaggctgtggacatattcagtctcgggtcggtcttctacacgatcatgaccggccactggccctataagtcgcctgggccattccgatctgtggcagagaagaatgactacgaagaacgagtagactctctttgcgtctcaaaagtatccttcagttgagggtcttactggtggtgccgtgatacagggatgttggacagatcgatacagtgatgtggcgtcgcttattcgagatcaaaatctgtctttcagtgcgatagaagcttctggggatgggcatgccatcgctcaagtagcttttaacaacatgtgaatccatttgctatccttctttcttccaacccagcacgaaagaatgaaccagaatcgaaatcctttgctaacccagcaatctgatcaaactccctttgtccgcttcgaattggctaaggaaatttatgggtttctgcagccgtgcgttccacattttccggcttgagcctaatcctgtctccgcactcgtagatttttgttggaacaggtcaagaacaattctcctcgacatttttcacaatcggagtatttatagcgatgctagtttgaaatccccatatctttgagagcggaccctctctaacttggttatataccgactacagagtacggagtagtatataccaatatagcccatccacgggttgtaccttatgggaattgcctggaagacatacctaagtaggcttgatactcacaaatccgaacaaactacatataccctccacaccaaagcaaaagattagaacccgaggtactctacttacaattatttaataacaaatactaaatttggacgattacgagcgcaccaatcagaccttgggacgcatccggagcgggtcccattttagctttcgcttatagtgcacatttaggctgaagatacataactagtaggccggctggcccaatggcaaggcgcttgactacgaatcaagagattgcaggttcgatccctgcgtcggtcactgaatttttgcacccgaaagatatattatctatataatatacactgtagagtttgctttttgctccatgggtaagagaatcatacctatgtagttcatttccctcaataccgttcatagcaggtatgtagaaacggagtcggagaatgaccaagattatatcctggaaggtattacaattggtatcccccatcaataagagagtatcattccgccaaatagatattctcagaaggagccattgatgagataggcgagagctttgggtccttgaagccccgccgctcaagaaaacaagtgctgttgggctttaatatatgtctcgaggtctggcaatggcatttaacctggtaaaggatggttatatattgccatcaccggctggaccagtcgcatgtatatatggaaatgtggctttgcgcattttacatatttttcaccacacgtattcaatatttacggctgatccttctcacagcgctagctacagcaccaaaagagtagaaccagcaaagaaagacatgcagaaagacaccgtagaagaacctcgaaggcctgggattccacttgacactattctagacctagtgaatcggactattggactgcatcaaggatagagactgcgtaagcgaccgactactaccggcttgaacagtatctcatacttacaaaactgtaccgacttgtatatatcacttatgagaaacacaaatgcatgtcgacaaccgacgattctattatgtatatggggatatcaatccaaatatgataaaactacacacgcccatggcatggacacctctaaaatcgtaacaggcaatccgaaccgtacactggtcgcatcggcagatcagacattgacgctatacccggaacccaccccgcgccgacgacggatcgcatgcagatacttacggccttcatccacccagaacaccgaactggcaatgcagaccagcttgaatagggacgcgaagccaagagcctcggtctggaagatgcgctgcaggaacggcaggtatatcacacaggcctggccggctaacgagccgagaacagcgtaattgaacattttgtttccgaacagtggcatttcaccgcgcaggacggacttgccctcactgcggcaggtcaatgcgttgaacatgtcgaatagaacgaagcaggtgaaggtcatggtggtgtcatgcgcggtgacgatgcgggagcgcttctcgatggggctgccgctgtcggtgagatcacccatttcgtggatgtagatggacaacgtgccgatcatgatgatcatggctgaggtgagaacgcgctggatcagaggctttgtcagaacacgggctgtcttgggtcgtggcgggcggttcatgatagtagggtcgacgggctcgacgccaagggactgggcgggtggaccatccatgagaatatctgcaatgtttgttagacaaacgggcaatgaaattagacgtaggaatactcactgatccacaagatctgcatagcattcagcggattcttgaagccaagagtggtgctcagcagtacaagactgagtgcagccacactggtgctaagctggaatgtaatgaagttctggatgttatagaatatgcccttgccctgttcgattgcccgcaagatagtcgagaaatcgtcgtccgtcagaatcatgtccgctgcctccttggcaacgtcggtgccaagcttgcccatggaaatacctatatcagctttcttcagagccggtgcatcgttgacaccatcaccggtcatggcaactacatcgccacgggcttgaagtgctttcacaatcttcattttgtggtctgggctagtacgcgcaaagatcgagaccgttgagatcgcttgagaaagttcggtggcagtcatgcgttcgagttcatcgcctccgatgaccgatcgtgcatgcggggaatcgctaactggcatcccaagcttcttggcaatggctacagctgttgtctcggcgtcgccagtaatcatgatgattctgacgccaccagacatcaagcgtcgaatggatttgtgcacatctttacgcggtgggtcgttcatacccaccagcccagcaaagaccaagccgttgtatcgctcgtcatcatcgccctggacgatcttcggggacgaccgactgccaaagcccctgccacctctagacatatcacgaacaaccccactgccaaaagcgaggaccctaaggccctctgatgccatattctctgctgcctcccggatgactttgcgacggggctcgtctagaattacttctcgaccatccttggtgagataagtatccgatcgtgctaggacctgttcgagagcacccttgatataggcaacatggggacctccattcggatcgccaataacaacacccatccatttccgctcggagctgaacggggtctcatggacgcgagcactgatacgatcgcgcacatcatcttcccccagtgcatccattaaatccagaattgccacatcggtgggttgacccacccatcggctcttggcagctgccgaatcactgttgacggttgaagaaagtactgccgcagaagatgcactagctggggagtttgcgtgaatccgtgacaaacgagagttgtttgcaatattaccaacgcgaaggattgtccgcgctgcagggccaggagcaatcaccgaggtcatttctctttgcacctcgaatggttctgggcagtcgaaatgccacattttggtaactgtcatgtggttgagagtgagagttccagtcttgtccgagcagacgacattgacagaaccaagggtttcaacgctggggagtcttcgcatgatcgctcccctcttagccatgcgcaggacgccaagagcgagcgtgacagtgacaatgataggcaagccttctgggatcgctgcaacagccagcgaaacaccgattgtgaacatttcgagaatcttacgaccttgtataagaccgatgaccacgatcaatgcaatgacaccgaaagagatataacttagctcctggcccaaacgatccatggatagttgtaagggtgttcgagggctctcaatttcttgtagagaagctgatatgctgccgaattccgtcctcgcgccggtcgagataacgatgccctggccatagcctgagcggaccagtgtacccatgaacgcaacgttgtgctgctcgtttaaccgaatgtcagcaccaacagcaccagtggctggtgcatcgtagaacggagatcgaggtggttctactccttttggcgctggagtggccctgccagatgcgctgcgcagagcttctgcatacttcgctacaggctcgttctctccagtcaagttcgactcgtcaatgctgagatctgttgctgcggtgattcgaatatcagcgggaatacggtctccggtagtgaagagaactaaatctccaggcacaagttcgttcgcggggacggttgaagaagccttgaccgcggcagacgccgagcctgggcttttgctccgtatttcatccatctccatggacgaacccaggggcgatgtaccaccattatcagttgcagcgggggaagatgttggaagatcacgaatcaaatgggcataatggggtaccagtcggctcaatgcctctaacgacttttccgaccgatactcctggacaaagccaacggtcacaacaattgttaccgcaagagtaatactgatcgcatcgtcgtaattgcccatcacaaaagagattccagcagagccaagaagcaggagaatcagcgtctccttgaattgtttaaggaaccgcaaccagaggggttccggctcatcgtggggaagctcgttcggtccatctctggccaagcgtatctctgcctcggctggtgttaggccgtgtaaaagggaggttcgtagtcgctcggcagtttcatgaggctcgagccacgaatatgttgaggtggatgtctggtacagaataagaccgcgtgttagaaactccattgtccaacggcgttaagaggtagaggaagtatgtatcacatgtagtacgtgaactaagcaagaatacttaccgacgatggagcacttggccgtccggtcatgggcgttgtggagggaggccgaagaaagtcggcgtttgatgcattatgcaaaggcaatgaaggtgttgcggaccttgacattgctcatgctttgtaggatggattattaaagtcgatcaaataagacgttagatatgtcgagaagtgattttcatgccgctgcgataagaattgagtagttatgcttcggcaaaatccacgttagatgcgatctggcagcagcttcacacgggggcggctagactaactgctggatttgcggagttggcgcaagtcggtcgacgacgaacaagggaccgaccgatgacttgggaccaaaaaaccaattgaaaagagcgttttgctataatccaaaccgcgaaataatcccattcagagcatcgagtccacttggaagaggctaatcccatgatgatgctttacccgttgcggcctagctatttcgggtagggagtttatccggttactacatatagactagcgcaaggtatcacgtgtagggcggagtattcgatgtacaccagaagagcattgatttatatatgagttttctatgatttcctgaaaactttttttggaagttattgatgcttttttatctatttacctcactctgacattagccttttcactagcaaaattcattgttgtgatgcttcgaagcgtacaggctctcctttgtgtaccatacacgtgactcgagacattcccagccccctcaattacatcagcaaaattcccgcccaggccacggctgccacctgatattcccaccgacgcgcatcttccgttcctccttggtttctcagccaactccaagatatccctcgcgcgcacataccctcccaatcttcatcgtcttcgatgtcttgaatacacacgttcgagtgataaactttttatccttttagtcacatatctaccttttcataacaattattgagtgcgagtcatcgcacaggttattgttttcccggcttcagcgcgtcgcccttctacacctcacccccgcgccgggcgggtcttttcgcctactgaatttggtggaagacattttgctgttgcggagtatctcgctgcgacaaacacactatgttctattccgagaccctcctgtcgaaaaccgggccgttggctcgcgtttggttgtcggctaacatcgaacgcaaactttcgaagtcgcatatcctgcagtcggatatcgagagcagtgtcaatgctattgttgatcagggtcaagcccctatggctctgcggttgagtggccaattgctactgggtgtggttcgaatttacagccgcaaggctcgctacctcctcgatgattgcaatgaagctctaatgaagattaaaatggtacgcactccttagaccaatactgatttggtacagtctaatcatatatcaggctttccgtctcacaaacaacaatgacatgacttcgactgttgtcgctccaggcggcattactcttcccgatgttcttactgaatctgaccttttcaccaaccttgatacctctctgctcttccctcaaaccctagacctggagcctgctgccaaacgccctggtggcatggattttggaagtcaattcctcccagacagtagcttccgccgctctgtttctcaggaacctgcacgccttgaagacccttcccttgttgatcttgacttgggtgaggatgaattgccacttgggaatgacccgactatggaaattggtcgagatgcccccgctcctcgtcccgtggaggaagaccttttcaatgacgctggaaaattcaatgacgacgacgatctgggactggatcttggtgatgatgaggctctcgacaaaatggaccttggtgatgatgtccatgacaatctgaacgacctactaccagatggccccatggacttcaacaacgatggcgactttggtggtggcgagacaccccgtgccgccgacaaccgattcgaacgtgactccgaaagccccctttctgacgctggatccgatcaaatgaatcagctcgaagaggaattcaaccgagatgtgtctgcaacccctgatgccgttagcgcccagcagggtcagcgcgccaagcgtcagaagcttatgggactagacaaggaagtcgcaatctctagctccaagatcaaggaccagcagaatgaccgttctgcaattttgaagcccgcgtcatttttgcctcgtgaccctgtcctgctcaccctcatgaccagacagcagaatggcaactttgtgtctagtgtgtttggcgaggaccgtgggcgcggatgggcgcccgagctgcgcggcatgctctctttggactccgtcaagaaggccggtgagctgaagcgcaagcgcgacagtggcatttccgacatggatgttgctgccgtcgacgtccctgcccttgagcttggtgacgaggaagccatcgtcccaattgacgagggcatcgctcttgatacgactatgaaccagcgctctgagattgaattccctggagatgacgaagaccaccacgccttgcgtctgagtgttgacgaagacatgaaccagcccatggacgagctggacgatactattgcgcaccccgtggatacagagccggtctcaatgggcaccaagcacgctgtgcacattctccgcgagaagattggtagcccggccacccagcagaagaagagcgtgttgttccaggatcttcttcccgagcagcggtccagcaaggccgatgctactaagatgttcttcgaagtcctggtgctggccacgaaagatgctgtcaaggttgaccagggcgccaagtctatcggtggtcccctcaagattagtggcaagcaggcactctggggctcttgggccgaggagaacgcttccggtgccatgagccagctcagtcaggctctgtagagggtgtgtcctcttgaccaacatttgggatctattggcgcatctttcttttcttgtacagctcgactttgggatggttctgtggaatatctcgatttgagatccggtgttttcttttggggatagcgttcaattggatgactatcaggagtttagggatggctcggagacacgggactttggttactacttttttgttgggtttttgtctgggaacctggtcccttccaaggttgggagcgacattgatgaattgattctgttccgtagtagtgttagctctagcttaattgaacatatctctatctctatcatattttcatacttgtctcgactctgtttcggagttttcatctcggagactttatgtatgtacgtttgtgctgtaccacatggcatcatcccacacgtgtttaagctcttggcaccaatgccccagttaaaacactgaagacaatgtcaatgcattcgttaggcctagactaggtagaattatacatgttagaaatacagttagtgatgttcaaggctattattattggctatacgggatcccgaggtcggcttcgagatcgcggaattaggcccccgtagagctgtttatccccgggatcgccattgattgatcagctcggacttttgatttccattttagacgctaatagtaattccttctctcgcaaggtagtgactcacatatccagtccatacatatacctaggtagctccaaaccattcgttttgttttctatgacttcatcactaacacaaaaaacaaactagatgagcaagcctgacctttgaccgtttggccacctgctcgagtatgtctccgcggtcaagtacagacgtgtcgcacccagacatcagcgaagaaaaagcccacactggcccccaaagatactctagcgataagagcgacaacgaattcgacggcaccaaatccgacgaagtgacttacgctccgatcaccggtacccacgataaaagcagtgcaccactccagaaacagcgctcgaatgcctctaaatcagttacatccaggtccttagaacgcagctggtcattgaacgacggcgtcagtattggcggcgatgaagtcgacgaggctgcagtggcgagtgaggatgaagcgtatactgtgggctgggaggataacgatcctatgaatccgcgcaatatgagcaaagcccgaaggtggctggttgtcattattgtctcgatgggttcgctttgcgtgtaagtagaccgccggtttagtctgctttctctgcgccgcacagaagctgatcggccgaatataggacttgtgcgtcttcgatgtataccacgacatatgaccaattgatgagtgagtttgggtgttcgcagatagttgcgactcttggattgtcgctttttatttggggtcttggttcgtgctgatcttgtcgtctttcgcaggctggattctgtgttgacgtttctcattttaggaattggtccgctctttctgagtccgttatctgaggtttgtttgggatctttgctgctaaatatttaagttactgatctggtcttgctcagttttatggccggagaaacatttatatcgtttcgttctcgctgtttctcgtgtggcttattccgtgcgcggtggctaagaatactgagacaatgcttgtctgtcggttcttcaacggactgtcaggcagtgcctttttgagtgttgctgggggtactgttggtgacatgttcgatcgccatgaacttgcccttcctatgatgctctacactgcgagcccatttgtgggccccgaagtcggtcctctgtaggtctctttccggaagacaagactttcacgacatgattccgatgctaacaaccactagggttggtggcttcattaatgcattcaccacatggtacgtcctcatttcggaattctggaaactattgaagcttataccactcgcaggcgttggacgttttatgtgctcctgatttggacgggagggatgctcgcctctataatattcttcgttccagagacctatcacccagtgtatgtatttccaaatcctggaataactgcgacgctaagaatgttccagactcttgaggcgcaaggcgcagaagctgcgccaggagaccggagacgatcgatggaaagctccaatcgaaaagctgcagcgctctgtggcccgcacggtcatgaattccatgtaccggcccatcttgctcttgacattggaacccatgtgtctatgcctttgcattttctcggccatcctattgggtattctgtacctcttcttcggtgctttccagctagttttctccgaggtgtatgggctcgtaatatggcaacgtggactgtgtttccttggtctctttgtcggaatggttatagccattttgtcggatccaatctggcgccgcaactatgctcgcttggagcgtaaccacgagaaagccacggacaagctcgacgatttccagccagagtggcgactgcccccaggtaagtttgccagcgaattgctcaggtgccaaggctaggaaaaatgatggctgacttcgatggaatagcgattctgggaggacccttggttactataggtctcttcatttttgcttggacaatctaccctaatgtccattggattgcgcctatcattggcagtgctgtttttggtgctgggtaagatcaaccttagaacctcacctgaccgggcgaccacccgttggttttacaatccctgtctatcttctggctttctctgctgtgtgatgctaatggaccgtgttactgctaggacaatcctggtgtactcgggagtcttcacattccttgtcgatgcgtatccaacatttgccgccagcgctctggcagcgaacagcttcactcggtcatcctttggaggcatattcccactattcggaatgcaaagtaagtttgtctgcgctctttccatgctgggacaagattggaagcccgtgctttgcatgaagcgcatctttccaatgcgggtcgatgcgttgcattttgaacaggcctatctgtagctcttcctcaatgcttgacagctatattcttgcctgcacacaagtcgggacgtaaccattatagctaacggctatgcagtgtataacaacctcggatatcactgggcaacttccttgctagcgtttctaacccttgtcatgaccccttttccgtaagttctggttttgacatacttgacttcctcttacgctatggcctccctatttactcccctgcatcttgaacctcgagcatgtcatcttatggaattttgatattccagttgcctgtggctctgacaagagataactcaaaacaagctgttctgcccactgagcgttctactgacattcataataggtatttattctttcggtacggtagctggatccgaagtaagagccggttcgcgaaatcacaggcgtgatcagtacttccgtgcacatatgatacccccatacatacattaatctcaagcaagttggttgctggccggatagctcttttacgaggacagccacaggtctagtgtcggtgtcattgcatctcaacggtttaccaaacagtttcacctggacacggtgtgccggaggcgatgaacacggcatcccatgaccagatgttgggaaactcctgggctgagatgtttggctactgaggatgatagggtcaacctggcctgcaccaattgatcaaaacctaacgcctccagctgctgtaccgcctgcggttcaaaagccaatgcagaaaatcatagtcaatagtacacatgatcggcaaggatatatgcttcatatcctagctccacttgattccatacgtagagacatcttgcatattcgatctggccgttcctggccccaagcagaccatgaagcctttgatgccactagcgtgcttggtgcaccaggaataatagatccccactccaagaatagaagttggacgaacctggcccgggctttaattctccgacggcaaccccccagtctaccaggccagttgcgaagcatacgagcgtcatgtggtcttgaaatccagtcacaggcagtcatccccaaccaacttaaccccggctgcaggcagacatgacaatccttcctctatagcaatcgtcatagctgagcgatacattgaaagccttctagcctcggcagagcatactcagccagcctcggagcaaaacgggatcggagcgcaatgccgagaactgtggaaagtctggagcggggtttctcgggatggatttggctttggcagaaggattaatgactcaattggagatacttccaaggtttgcattcaacgtttagtcatttaagaggagaacaaggtctaaagtatacaatcgacctggaagttcccgcacgtgcgcaattcccctgcggggttactaatagtataggtcaatccggtatgcgctgaacccgatctggcggaggatttataacctggccaatcagagctcgtggacgcgcttaaattacctgttgtttccggtaatgctgtgaaagctgtaatacttggcataatcaaatgccggcctccagtgaccgttgctctgaacgtcagcatgtgagtatgatgtacatagtcctttcatattgaagaagttgaagaacaatacactctcaggacttttgagtagagatatatttgtaaattaaaacatgcccaacgtggattacgttgggtagcaagaaaaagaaaagaaaaaaatagaaaatagcccacttaattaggtaaaatagtggctgttttacatacgaagtatacaacatagccagccctgcgcctttttagagccaaacagagtgctaaaatacacaaaagaaattgtcaaataaatattaaaaaaataatattaaaaacctcgtcagtcatagtctcatttagtcctttacaagtcctttacaattggactgtgttcgtgttaaaactgttgcttagacactagtcacgggaacaccccgagaagcccattctcagagtcatccacttcttcttcaaccttccccgcgaataatatttgcattgccactcgactttctttctttccccaacttatcgatcggccttgcatcggcacggctctcgcatttggagagaatttcatatcttccccgcaaccgaacggactcgtccacctctccactctcagttcagccccgaaaccgttgcgggatttttctgctgtcagctttgcgccaatttttctccccatctacaaaccacattgaaattcttcaatgtgtcagatcatcgtacatccgtcgcatcttcagtcgattgtcccccgttacacccgtgactcgactcgccgtgattccgcctccgattccccaccaactgtagtcgcaaacgcgcgattataggaaccaagacctggagacccctccgaccttcgcgaggtgattttgggtggatttcgagtctcagcacggacgattagcaatttgcgatcgtttcctttttcctctatcacaagctgggctgtatctcgcacgtggatccgctcgcccgccgagatcgaagcgcgcatggtatcattggtattgtcgccaccacgctttgtttctttagataaacacaagaagacacggaaagtggcctacggggtttgaatcaccgatttacctcacttttgtggacgcgtccatagatcatccgttctcgggattcatgccgaaatgaacatggagaccaaaaacggctccccagttcctgcgggggactacagtggagaacgtgactccgccgatatcacagagcacgaacaaatggacgtaaagcccaaaactaatggcgatagcaaggcggaccgcaaagcagctaatgccaaggatccctcccgaccgcgacggaagaaggcccggcgagcttgctttgcatgccaacgagctcatttgacttgcggtatgatgatagactaaccctcgccgttactaggcatctgactaatatatatcgggtttaggcgatgaacgaccgtgtcaacgttgcatcaaacgtggtctgcaagatgcttgccatgacggtgttcgcaaaaaggccaagtatctccatgatgcccctgatggggcgttgatgccggctgttagcagcaacaccaatctatacaacaatacgctccgcaataatctgcctatatctagaaatggcacaaatgctgtcaactccaaccagcaacacagccaacaacatccccaacaaccaaccaatcccacgaataacaacttttaccctacgccccagacgcagacaggatcttacaatccctaccaagaatcgtccatgggccaaagcccttttacgacgcaatcacccgtttcacctacttttaacatgaagagcagcaccaatggtcgaaatccgagtctttcatcgactgtgaaccagcagcctactccgagtactgctctctctggggatacaagtcagtcccaaaatccttttgcagggccattttttgatcccagtgatccagcgctcttcaacttcgatctatcgagcatgaacttcgaaaaccgatacggtgctctggaattcggcatgcttgggcatatggctaccggggcggccggtgactctcctactgattctgcaggacagcgagggtcgatcggccgaagtggatcagcccagttctccacaccagctcctggatttggagaaagcccgggaaatcaacctttcatgttcggcgatcctctcctaaatgaatggtcggccggaccggcctcgggccagcatgtgaatgtcggcggtgtctatgccccaaataccatgctccctgaacacatgaaagcaaatgcaccacatgcatttgccatcgaaagtgggccagcaagcttcactagtcctggctcggccccaagcccgaacattccaacagctgcatttgacgacggcccattcaacaatatcgctcctgccccaaagtccaacagcctggtgccgaatggacaacgccaggtgacagcatcgatcttgaaacacccaaatctgcaggttggtcctaaacggcgccaccgcaatccttcttcgatttacgaaagcgtgaaggagccctatgcttacacaagtggcttccacaacctcactgctttcattcaacgtcgctttacgccgcagaagaccgtgcgaattgctaaggcgcttgcctctattcgaccctcttttatcgcgactactaagactcttaatcgcgatgacctcatcttcatggaaaaatgcttccagcgaacgctctgggagtacgaggacttcatcaatgcatgtggaacgccgaccatcgtctgccgacgcaccggcgagattgccgccgtaggcaaggagttcagcatcctaaccggatggaagaaagacgtgcttctagggaaagagacaaaccttaatgtcaacactggtggttcagccgtaccccagtccgggacaacgtcacgcggtagtttcacaccgcgcggctctaccttagagaattccggcactggacgcccccagccggtattcttggccgagctcctcgacgatgacagcgtcgtagagttctacgaggactttgcgcgtctcgcattcggcgattctcgtggtagtgtcatgactcggtgcaagttgctcaaatacaagaccaaggaggacatggaggttgcacagtccgatgataacggaaagtggaacaaccacctccgcaagggtggcattgctggcgaggctggcatgaaccagctcggtttcaaggacggaaaggtcgattgcgcgtactgctggacagtgaaacgcgatgtgtttgatatcccgatgctcattgtgatgaatgtaagtctctcaccaggatcacgagagttttagagttggtctcatgctaatctgctatcttctagttcttgccatgcatttgatctcttttgattttgttttctgatcttgtttcaattaccctttcataccctcggcaaggcctaacatcaggcctgtcgtcttttcttctttccttctgctgttttacccggtacatatttcctggttctgggattgtatgattccctttgatgttgatttccttcggaccactcgcggacggggtctttatttgttatatgttctcgtacatacgttatgctgcttggatccctggaaccaattcccggcttgttgatatgctttcttgttttattttctttttgcggcgctcaaaagggacaaaaaatggtatctccgggacgggatcgttactgtatgagcataatgcaatgatattgagtggggtcacttttgacctcgttgagccctagaccatccatggatctaattttaaacaaagataagcttaatccaaccttgggattgcagacaatcttggaacctcacatggaaagccgaccctaccaagtcccgtggccttatcctgtctcaggaggtgtaaggagctcccctaaatcgggcttttttttggcttttcttcaccactccaatacgtacaccatttaacagtgcttttttctttgttttttaccttgccgcgcattgcgcggacgtataagctcaaatatatcacaagacccacccacagtcgagtctggctagcaggaccattcacaaactacatacatacgtatgtactttttgaagtcgctatactcgaacaaggctaagaactaaagaataagcctgtatcctgttggaagcgttggagttgcttgtgtattgatgcctggtacctcaggctccccatgcacaatgtaactatccttatcgcgataacccccaccaggattaatcgtattcggacactcaacgccagcatcacaccaaaccattgctaaatcacacaagctgtacacacaaacgaaacgatactattagcagatttgtctgtgttaatatccacgctttaccataccctcacccgacagaatccgccatgcgctccgacaagccgcgcgacccggtagccggccccgacgcaggcccggagcctccttatccggtacgactgtcagggccagtgatcaagggatttggccgcggaagcaaagatgtacgtctaggagtctgggagccacacctcgttgctataatcgcacagcgcaacgcgcacaatagaccctccactgacttgctctcccggatggctacagctcggaatccccaccgccaacatccccgccgatgacctttccgagaagcacccagaactgacaaccggtgtctactacggcgttgtagcgctcgatccgacaacatatcaacatgagacatccgagggtagcacatctactgcggtggttttgcctgccgtgttgagtatcggttataaccctttctataagaacaccgtgcggtctgtggtatgtaatatgtgatataaactagacgagatgccgtcaaatgttgaaactcgtgttttggggggtattgggctgacgcggttgctcacttcaggaaatccatattatgcccgctctcacagaaccatcgcccaccgctgcgggacaggagggtcagactaagttcaatcgcttgccggatttctataagacaaaactcaacctgctgatcctgggttatatccggcctgagtttgattatgtctcgctggaagcattggtggaggatattcgggtggattgtgaggttgcgcgggaaagtctgctgcgcgaggcttacaagtgctatcttgttgacagcggtaaaatgtctgggaaggtgagcgaggatcgtgagtggttgttgagcttcgattaagtggggttaaatataccatgccattcggggtggtgagatgggtatcttgcattgcgatgattcttctatagcgcagatcatttctttggatagacatagaaagaggagcgttttgttgacatgtcatctcacatcgtactagatgcgtcttccaagcatgcccgggtgaaaatgtgcagccctaccctatcttatcgtggaattgtaacatcaactacgtcacacaccaagaccctaagcattggcaatccgctcggcatccattttctctcttgacatatgtaatacccagaacagcaatccgagttttccggacaggaaacaggtattccggtctataataacaggggtacatgtccttccgaatccccaatctacagatcattccatcaactaccacattcaggctatggtcaacatattccaacgcctgactcgacgccgagcccaaagccccagcaggagcccgccacatatggacgctgacaccacgggccccaactccgcagcatctcatccgcacggaatacatcggacagtgagcacgagctccggcagacgacgcagctggcgatatgaagagccatctcctcgacatcttatcctgatctccgataccgtgcagttcgatacccacgtagttcaccgcttccaggcggaaggattccaagtgatctatatcccctttcttggcagcggggatgaagataaggacacaaaagtgctgaagaatatcgtgcacgagaaagaagacgaactcgagaatggagagcggtatgcgatagtgggtgcgtcttctatccgactattcttcttctcttcatacatgctgcactatccgaagcaggcacttcagacctgcaagatatagcaaaacccaagctaaccatatacctcagcatatcaccgaccagcctacctcctcctcgccttacaccacataatagccagcaacacaaacccattcccacacctatgtgccctaatagcctactaccccctctcttcaacagaccaattcacctacaggggaaaagaggactgctcgtctccgggctgctcagacacaagttcgatattcggcccagccgctaagtcaacatatctcccaatccaaatccatatcccaggcccacgagtccagacctgcgcattgtggccatggatggaactcagtgccaccgaaggcgacgtgacgtacaagaaaaagcaccgttgctacgtgtacacgtacccgggttccagagctggattcgcggagcgggaagtcgccgaagagaaagtaggcgaggtggatgtggacctaaacgcggatgacgagatcagctcgcagctagcgtggagtcgggcgctgtcgtgtctgcggcgctcgttcaatgtcgggagtcactgggccgttattgatatcgagactgtctgggaacaatactgggaccgtgtaactggcgagctggagacgcgaaaacgggaccagaatagtcatggttctgagtcggcggtcgagatgttgactggtcatggccattatggtgagatggggtgtccggctggtgaggcttttgtcaggtgtattcctacccaggctgggggtgagtctttccttttctcgctttattctctacaatctggtttgggaatttactgacatgtatattacaggctctgatatctcaagcctgagagatttcttcgctcatatatatattcctgccggaccggttgatcagcacatccgccttttgtcgcgcactgtgggtgcggatcgcatcgtggatgagatgctatttgcttgtaaacatactgctgagatcccatggttgctgcctggtgtttcgccgacggatcgagacattagtgtcatcgtcgttgtggtggcaagcttcactgccggtcagattacacgccagagtctttattgggatcaggcgggtgtgcttgtgcaggttggattgttggacccgggactggtgccatcgtcaaaaggcgccaaaggaaaggctattgaatgttgagtggtgctttagtctgttgatcatcttgtagatgactgcatggaggttaatagggactacgaagacaatctacatacgcattatcagcaccgtccttccccttctctttgtgcctattgacccacactctgaacaggtttcaagcttgtttccatggtctctatattagttagataaccttcaaatgacagggtcaaaactattttggtctcgatgagcttgtcgattagtcagttccataccacttttcagactatagacctgtatggctggattatgctggacgtatctccataactattatacattatatctgtaactagaaaggaatgcatttttctgggctgcgcaacgttcacctgtatactgaaattggcgccaagaaaacaacatccgagacagaacggataatgtgacaactagaacagaatatcaaccaatcactacatagccgattttcattccgttctcattccttgcaagtaggcgcaggccttcttaactccttgattttatttgctgtcggtcttgccaggaatagttagatcctgcaccctcggagaccgagctggactgccccattttaaggagtgaagttacgccgcaacgtagaataaaagggtaagggtacctacatgtatgtatagtactctggcttctacctcttaactactttgatcgagattctttttctctgctatttcacatatttactcgaacactgctatatttcataaaccatttcggatttaaaagcttctacccctgggttctacaccacgcttcccaacgcaatgagcctttctgtcgaagctattatcgcaatcatcgcactattcgtcgcttcaattcagccactgtgcaccatttggaaatgcttattaaggaagaattccgagcgaggtatgtctatgcccacaggttctattcgttggcttacttgctatttttatagagactctaccgacatataccatcggaaacagcccatccccgcacatttcacaagacctaagatggcagccttgcaatggacacagtatgacctacttaggtaagagttggatgtctccataagagatatggctaacgaatacgctctagatgattcgaccggactatactacaaagcgcggaagtgggagtgggaatactacataaagcattccatatgacatactatgtctccttcaggttgtatttttatcttagggtagcatatagcatgcatcatggctatagaactgtaagattatgttctaataaaggaggataagttaaagcaataagtgctttagtgggtgaaattattagcttattatgccttctaaggatactaatccccaaagagacggtgttaatgtaagggaatgctctatatcatcatataggcaacctcgacggcacggaaatcccaatctggaggcaaagccgaagcaggatcaacattgttacgaaatggataattttcaacagacgagcatggtcaggtcggcctgttgaatccgggacttatgccgtcgtcaaaagctgtccaaggctatgaatgttgggtggtgttttagtcttgggcttatctatcttgtagatgactgcatgcggttgtcccccagaggtccgatgtttcgccctgtcgtgaattgtatttctgagcccccatgagacagcgtaggcagaggcacggcacctggtgcttacatctacggagatctcaatgtcattgccattgtcgaggtctgccgtatgccggtgcgcaccctgacaaattccagctctcgtgccagctctttgataaagtcatggctgagcataagctccatagccattggcggtcccacgggatacatcccgcttcttttcctttccttttgtgatatcatcgcgttgacaagctaatatcactcttttggagacatatcaaatgaccatccacattgcatccgatgatttccaacctcgtaacttgaagctggtcgccaagcatagtcaccagcttctgccatgagccttctggttttgtactaataccaacgttgttcaggacaatctctctcaaagtgttttggtgcatgtcgaaaagtaataccagatcatctgaaagacagtcaaagccaccaagccgtaaaactcgaagatttggtagattcagtgcacgactgagcgcttggaatcccgttcgctgtagacgtgtatcgaaatacagatcaagtacctctaaccgaggaaagagcaagataaaatcgacgagaggcttagaccaaacaagttgatcttcatcatgatccggacccatcaaaagctgcaatgaagtgagtgtcccagcccatgggagttgtattcggtgaagttcagggaatctgagcacgcttggattcatcgctcgtccaagtccagcattcaattccaatgtctctattaaggccccgctggcggttgcagcggcaataatcacatgggtcacttgttgaatgtagatcttgctgtattccttttcgatacttgaggttgggtacactcccgtttctctttgtagaaatgcagctccccagggttgatcgtggtcagccagggccagagttcgacagtggaccgcattcgctagtatctctgataaatatgtcgtgtccaggcctgattgtcggaaggaattttgttgtatgtaatattcacgatagctctttttattaatcggaggggagacattccgctccgttcggcctgggagatagggctcatctgaaagtccatccggggtcaagtgattggtggtgatgaccacagatcgtattgaaggaccgaaaattggatgatgcgatatgtcgagtagattcataaggctgtgtcggcttagcatgtgggtccgcgtgcggaagtagagcttgaggaagagagcgaaggtactgtctctcaggtataaactacttagacgaaggttgaagaagtctttgctttcgatatattgggcaattattgcaatgatttccgggctaaggctatcaataagctgtgacattttggcgcgatggaaagtatgatatctctgagagtcggtaatttgcagcttttgctgaaggagtatgtgcaagggtctgccaccttggaagaagacagtcaattatttaggattttattttcctccgtaatatttgcgccctaaccatggtttatataagttgaagttcgacttctttggcctccgcggagttagttgcatcagaggtctcatgtgacatcaatagttagggttttgctatgatgcgcatcataaaacatctcaaacatgaatctacgtaacaacgtacgtccattcggtctagaatattaatagaaataatagggagctataacactccctgggccttgtagtttccgacagtagtagagctcgtcgagactctcagagcattctccgtaccttaagaaaaatatacaaccatatatttcgtataagtataataattctagaaacattgtacatctaagctcacaactttccataatacaacccagcttaacatctcaacggtgttgtttctctccgagttcgtttctcccagtgtgctcacaaatccccgtggacaatgatgaacggggggaataagacggcggggagtcatcatcggagatgttctcgtgtcctctcttcgactcagggtcttggctcgccatgaccacaataggcaaatcagagagtttgaactccgtagttttccccgcacacaagaacacgatcgagacggataacctatacgttctacttatattgagcgtccggaaagatatatccgtatgccggaatataaagggcccaaccaccgtgtccaggtccatacttcctgataccggaatgttcacagaaggcctggatatgatttcaatgcgctcatccacctcagcagacatcacccctaccagagacggtgtagctcgggcggcagtttgacctgtcacgaccacgtggatagactgcatcaggatctggggcggatacccgatagaggagttctcgattacaggatcaacatccaaagtacacgagagtggccttgactgcaccacgtgggtctggtaggaaaaagcaacattgaatgagaagtgaggcaattttcccggagaaagccaggactggaacttctcttgaacgcttagatttctaccttcatatccgggaagaaggtgcatgctccgaatattgaatagttgctcctctcgtcgcgaatgggctcggggaaagctgtccttcgcaagcggagtcattttggccgacgcaggcataaaactcaatcggataggctcggatagaaatggtgagttcctgcccaggaagcctcgttgtatcttggatccttgtgcgtatattttgtattcgatcacacagtccaactgtcttaggtcgtcctccgctttcttagtgaatgtcggtggcagcggatggcctgcgtcattatagaaaggggtggtttcgggccatcgcggcgaattcgttgatggctggacgtgagaagggaaaagaaattcaaatggccactgaaagaggccatttgaaggtgcttggcagtcgtggagtgaaaggatgcgctctttttcgaatagaatacatttgctgcgatacgtcgcggacagtgctgctgatctcttggccttttgtatccgacatttcgctcggccaacgaagaccacgcggatgtgatcttgaatatcggaaggggctggacatcgcaggttgacgtgaccggatattgtctcattgtctgagtaacacgttttttgattatcgagggacagtgtgagggacatggtgaatggtagaaggatgtagtagggagtagaagtagaattttgaaaagtttgaaacaactgatggccataccatccatggatatacaatatacaacatagttggatcacttccgttttgggaaagggaaatccgagataggaaattcactaaacgaatacgcgacgatcgcccaattgaagatcccggactcgagatgtctcacttttccgaccctccagacccagtgccaaacttcaaaaggacaagatctgcgataaacaaccacagtaagacctatttataacgaactaatccaggatattcgttatatccgagatccttataacggggtttactgtagttgggtttagtgaagaacctgagtcgtcgtccaagcccatcattcaattcgcatgtctccattgaaaccctactatagtcccaataagccccgcagctcaaccaatttcttgctcacacctccagcgctagccaatgttttacggctcgcctcctgggcaataggaatgacatcctcaatgcgtacagaaggatccttggccaagccagccaccacaacacctagcagcgtatcacccgccgcattgacactgacaatgtcctggtcatctagaatagtagcaggcgagaacagacgcatataaacaccaccgaaaggcacgtccgacccaggcgacgcgcgagcaagaatatacggcgcagactccggatccgtaaggcggggatcaccaggcggcagaagttgagtaaggagagcacccgcaccaccaagcttggtaacaatacagggaatgagaggaagcagctgaacagactgctgcggaagaccctcgtcgacgagagataccgaggtgagtgcaatgagacgctctcgcgagcccgtcggagacatattcatagagttaatgatatgccaccatcccgctgactcgaaaagaagtgactcccgcgcaacggtgtacatagccgtcagctcgaggcggttcggacacgcaagactaatagcattatctggaactgtctgattagaactgatcgtcgcaccggtgctgttcgcatcgctgccgaatagacgtcgggatttggccgttgaaacgggctcgaaggctacacgtgcgccgtgtttgcgtgccacagcactccacttggctatcacgtcgggtcgccagttggcgtcgacgacgacccagtttggcttcgtgcgttcgaggagaggttcccagaagccgtcgaagtcgagctgggactcggggagctcgacgatgcccatgtcggccatggctactacgaggtcttttttgatgtcgttgattgcgatgtattgtgctgtgcgggtgcttggtgttgccgggaggactcggatgccttcggtgctgaggtcttctttctcaagggttgagagtgcggcacggccgctgagatcgtctgcgatgacgctgcagaagaggacgtcgctgccgacatagttggcggcaacagcaacgttgtggccaacgccgcccaggctttggccgataattgctgggttggaggtatgcggtactggtgcaacctgtgtgagttcgtctccgaatggggtgtagtcgcaggacaggtcgatggctagcgaaccggcaaccacgacgtctgcttttatcgtcggtgtaataggttcggtgctgcctggttcagggatatcttcaacttgcgaggcaacttgatttggcaaagctacatctgggattgatggcatgtgtctatagggaaggagatctccgaacttagcattgattgcatctcgtatctcgtatctagaaacaaaactcaccgagaccgtgttcctaggtcagcctgttcaagcttggcaagttccacagctactagggttgcacgcttgacgttggactcaattaaggcccggttagcaactacgctctttccaccgcttagttccttgatcttagcaagcacaaatggcgtgttgtcactgccgtggtaaccctctacatgggaaaggcggatagcttcttcaatcacaagatccatctcggctttggggattgagtgctccagggggacggggttggcaaaatggatgccggaggttactggaagctttaattgcgcatctgaagatcgtgtcaacgaggctgtagttttcaacgcatggcgggtaaacttacaaactatggcagcagcttcagcttcattttgaatgactcggggactgcggacgccgctctctcgtgtaaagaaagcagggaagtcaacagcgccatcccggccatcagcgaatgtacccacgcagacaccttcggtctcgaggtattccagcgttcgaggaatgtccaagaagctcttgcatccagagctaatcaccgtcaccggggtacgtccaagttcagtaagatcggctataatcatttgtcaataactggagatcctgggtttgtttccacagttttccctaccagagatatccattgagctttctgctccacgatgcacaccacctatagcaggtcagattggcttcattgttcaattgaacttgggtcattggatttacctagtccaccggtaccaaaaatcttgataccagctagttctgacaggatcatagtgcccgagattgtagtaccgccgtgcatcggcttaccgaccattccctgatatagatcagtttcagtcttgtgaggcattgtagctactaactcaccatgccacagatatatccgaggtctctgcgagacacttttagagcgctcttgtcttgagccgttgaggccagctcgataagctcttccgtactcagaccaaccttggcaacaccatcaaggactcctatagttgcaggaactccgccattggctctcacaacagactccaatagtgcggcgagagcaatgttatcgggataagggaaacctacagccgatcagtcttggcttccccgctcttgggcgaagctcttgcaaggttcaacctcagaatgaacagagagaagactcaccgtgtgtataaattgtcgtctcaagtgatacgactggtttacctgtagcaactgcatcacgcacctcttctgacaccttgaagaacttgctctgggcaaggccgtggtaacgccgagcacacgacagctgggctcccctcaaacaggaccttagagcagctcgagaggcaaacatcgtgtgtgacaacatgatggtagctgaaaagaagattcagctgcacccccagctaagtgagcctgctagacaagtatgtaagaagtagaaatgcgagatgaggagaaagctcccgagctaaactaggccgttatcagcgataagccggagtgcgcgatgtggccgcttcggcgaccctagtatacaatggggaccacgtatcatcagcttcgcaagctttaggttcatcgaccgacacaatcacatctcggatttttgaacattttgaacctcggagaaattgtgtcctccaggtactcagaatgaggtttttcaccgccacggtgctcgggctgctcgcgcccagcctgtgcgccgcaaccaaccttactacgcctaatcgattggatctcccgtccggcttcaaacccccgcaggtcttcaaaaacacaaatttggttcggaataccaacttggaaaagagctatgtgcgggaaacgatcaatgtcgttgtggagaatgtcgacaagcagccccagaacgactactacatccccttctctgccgaggtgtttgaccgtgttggagccttcgaagtgagggataagaaggcccccgagaagggacgctttgacgtggactatactgaagctgtatcatctgggtgagtatcaattgggaggtcaatggccacgccagaggatacaccatgacatcaattctaacatccattgaaacagcggcaaccagtacttcgtcgttcaccttcccgaacctctggccccgaagtcgcagattaccctcggaatttcgtactcggtgctttcctctctcagtccccttcctgcgaccattcagcaggcggacaagcagtacctcacctactcgttttccgcttatacgccatccgcctacacgacggatacacagaagaccaagttgaagttccccagcaccaatgtgccggattatacaaccactgatggtctcaagtccggctcggaccccgagcgcaagggcgccacatacacctacggcccgtatgacacggccaaggtggccccgggcaccgagcacccaattaccgttcgctacgaattcaccaagcccgtcatcaccgtaaaccttttggagcgtgacttggaagtctcgcactggggcggcaaccttgcaactgaggaacggtactggttgcgcaacaacggctcgcaactgaccaaccagttctcgcgtgtcgattggacctactccaactaccaaaaagcgcctacatcggcagttcgcgagctgacctatccactgctgcctggctctgtcgacccttacttcattgatgatatcggcaatgtctctaccagccgctaccgtccgagcgttggtaagagcgctggtaacttggagctgaagccccgctacccgatctttggaggctggaactacagcttccgtattgggtggaacaatgatcttgcttcgttcctgcgccgtgccgcgggtgtcgactccgactcctatgttctcaaggtcccgctcattgagggacctaagatggccgagggcatccagtatgagcgtgtgattgtgcgcgttgttctccctgaaggggcccacaatgtccgtttcgaggtcctcgagggaagccacagcaatggtcttcctgtcgcggagcacattcacgctcaagtgagctctctgaagacttacatggatactctgggccggaccaccttgaccctggaggttgacagtctgactgacgaagctcgtgactccaagttggtggtatgtactaatattgtcacttgttcatctcacagttgtgctaactagacattaggttacgtacgatcactctatgatcgatgccctgcgcaagcctttcactatcttcgcgggtttgctcacagtctttgtcgctgcctggggtattggaaagatcgatgtcagcattaagaagcggtgaactgcgtgaaatgggttcataacaatatcattttgtcaactttttataggcgtgtccaagggatctcaccaattgactatgtttacagtattttcagcttcccttgtcatcttacctagatacctacataccgtaggtacttccaacgtccatgtgatcttcaagtccgagttgctccttcctctgggacgtaccttcccacttggatacgtgtatacgtgtatacaccatcggatcgtaaacgtaaacaaacgtccatgtcaactcaggtgtcgactcgttcttctctttttccctcactcctccctctccctcctcctaaatcctcactccgaactcctaactcacgctctacgcaatttatcgacctcagccatgcttcaaatcaagcagtcgccggacaaaccgcgtcctccccctgtcgatgacaacactacccaggactccccgtccaagataaacctgtcttctccccgcaaccgcctcggcccagtggtggtgttcatcgcccgagcctcaaacctgaaggaccacaactacccgaactctgaaatcaacagcaaccaaatgcacgaatacctccgctcactgctaatcatcaccgtcgccgagcaccgcaagcgatttggtctcctgggtctccgtccccacaagatgcagacaatcatccagcccgcccacaaccgggtctcgtccctcagccgagtcggcaaatacctggcaatggctctggaggaagcccgcgcatccaagactgagtgcatcttcgtcctccacggctgggatggctggacaaccgacaagatgaccatcgctgaactatgccagcaattctgcgacgtccccttttccttccatgtttatgcgaaccggggtactcctcgtgagttctacgaggtcaacgctcacaaggtcaatgcgtacttcagacacacggtcaccctggatgatccggctgttgtgggtgatcgttcgactgcgctttacatccgcatcctggaggctctccctactttgcaatatgtcaagtattaccctgttctctcggaggcggaaagggatgctctttcgaagtatgataagcgcttcgctgggatctacgagaaggacgaactcgagggtccgaagctcgaggttgcaaagtccgatgctccaaagccaggcgtttgatatggcatcggtacgtaagaatagcaataccagagttgcatcttccttaactttatctttcttgtatagcttgatattttgcagagggatatacgaagcgtgacactgattcatggaagggagactggagagaccctgggtcgttgaggagaagtcggatactatcaattgaacaatcagctttaatgaatatgaaatctctcattaaactgtttatggcaaaacataacttggatagaacgtagtgacatctctcaactccctatactaagcccccgcatatcttccctctcttccctcatttccccatctccaagctttctttgttatgaatgacatgaatactttgcctccccctccttggggcgggctggctatcgcacaatatttgatcgtgtgtcatccctttcaattttgataactgtgttgagttcaaagtcataatgaatcgaattgcaaagcgtggtctacgaacccatgcgctccaagcaacttttgaacacccgacctccactcccacggggtatctgtagctgagtccggaagatccagtccactgcttattcgaaacttggttcgaatccatcctctaggaaagaatcccgcaacctcccaatcaatgataccgacgtcgccggtctccggaatctcctcgacaaggatatttccaggggcgagatcagcatgataaaacacaaatttggattgcaaagagataagaccgaccatctagttcggtgtggtgcaagacttgagggatttcgaaatcaggccgcagtttatgaacaaatgacaatgttgcggcctcaggtgttgtaccaagaacgcgaagtttgaccttgcaaaaagcgctgtttcctaccgaccagactgccgagctatcgccgacatcgtagactaattggaacggatcattctctgacaactgtacggttggaggcagaggggcagatgcgttggtgagagtatagctggcatcgtcgccttcatcgtaccaggtacaggtatcagaatagccttttgaccgacggacttgtagcggaccgataagccaggtatttgcatccacctgcttgattgactctctgagaggatctttcatgatcttgattatggtaggctatcaagcgttgttgatcttaaattcatcaaattgtggaggtgactggtataaacatttgaattcaacagagttgagttgcgatacgaagaaacttaagagagagagagagagaagttgtggcgattatatgcgtccaaggggtggaaaataacactgcttacgctgcagcaagatgtaatcattctttgcccctgaccaacatcattggctatgattcgccaacttcagcgcttgctgccgggtggctgtttttcagcatgaggacgtactcgaaaagagcaagcctattgcagacgaggaggctttccggtctagaagtctgcgggtgctttatttagatggttttcgaaacatcattcgcgaaggtcgtgtgatcctgtggatgatgatatcttcaatgtgattggtatatggatggaaaccgacgaattccttcaatgctctactgttggggagtatcgagctagtgcaaagtcagggagggaactgtatcaattaacggatgagtagatcccgaggtcaactgagtattgtgatgtaattgtacagaagagcaagatattgtggtcatgacgcagaacaagaaaaaaagcaaactacctagtgccatccattgaccgtacccgccccagcacgaagttgatcaagctcatcttttcggctcttatacaaatcctgagcctctcgctcacgccgcataacaaatgacactgcttcgcggagtctctcaagtcgccgggacagagccgactcctcagagatctggagtgtacggaaagcgtccagttcatccatagcggcgggcaaagcagcaccagcctccacgatcttcgaccgcagcgtcttagcacggttctggtatcccccgtagtgcaaagagagcttcttttcgatcttgtttccgcgctcagcggtatcaaatagggatgtctgaacagtgtcgaaggccgcaatcatgcgttgttcttcttggaaggggtcctgctcgtcatcctcgtaattttcaagaccagggagagacttggcgcgagctgacgaccagccatcgtcgaatttctcttgccattccgcctgctttgcttccgtagaagcaatctcagcagcaatagaagcccgtgctgcatccaagaaccggtcgtccaattgacttaactttggtgcttgacccttgacatgcgcatccgggacggggaatttgcgagagtcatgtgcaatcagggcggcggcttcgttggcaatcaggccttcgatggtgtcggtgacctgagaggcacgctgcaacaaagcgtctagatcgagaacggcgggacgaggcaggcctcgttggtaaacttgtgattgacgcttgaattcagccttggcggccttctcccgtgcctcgttgttacggcgatcacgctcagcggcatcctcttcgctgatctccgtagtggtgggttcgacggactcatccggaatatcaaagtcatattcgaattccttgggcttaggaagcgaggccagcttgctgcgcatctgttgacgagtgaggttctcgtgcattttaatgtctctaggtgtactgccaatgagctgggcaccctctccctcccggttcagagctaaatgatcacgcggggtgcgcaatggcgtagcaccaggcccaacaccaccgtgcataggtgttgcacccatgccattcgcctggcggaatggcgtggccatggggttgggagtgacaatcgcctgccgacgaggagcaattccatcaaatccagttgatgagccgccctcatggaggggtgtgttatctcctccaaggagggaagactgagtttcagtcaaagctcgaatgttcctgatctcgttggcgatgtgatcctcctccggcgcagcttgcggggttctgataggggttcctccgacaatagttgagtaatttccaacaagttcccgagtgactgtatcatcggcgctcattcgactagctgctctatcccctgccattcccatcttgataatatcttccatttcgctttcgctgacctgcggtgccggcaagttcaaaccccgtcgtttgctgctctgttcagcctcgcggattttctgcatttgacctgctcgtgcagctgcggcagaggcggctgtagcactgcttttatcgttcttgcgcttcttgcgctccgcgtcgtcgtcttggccaccctttctcttatttgcgagttgctgcttccggggatcgaatgcctcgcgttggcgttcattctggtctttctcttctattgtatcgtagaatccaggagcagctggcttttcgaatggaatgtctgcattgtaatccatctggcctggcttccgcgtgacgaccttgacgttgataccggcatgcttgagttcacgacgcttctggagaacggccagtcgacgcgactcttctaattggcgctctcgggcctttcgcttggcttttttaccctgtgtattggcgagacgagcacgcgcttcgctcagcatttctttttcatcttcatccagatcgatagtgtcgggccgggcgggcttggactcagggtcgggatcgagttcaccgggtctaaaaggtatcagcaacacggacatcataatgttgtagtgtaagcacgtaccgtagacggcggacatcgtccgcactgggggcggcgctctcctcgccgggtcctcccagaccgagctcgtcattttcgcgagcttcagcctcatccagaagtttttggtagcgttcaagacattgtgtggcagtgcgcccgacgatgggggcaattgtgcgccattgcgtgggcatcaactttgcaaggtggagcagtttctcatcctcttcccgcgaccactcgactttgcgaatacccgggtccaaccattcaatccagcgcgccttgcattgctttggcgttttccgtgcgagcagtgaggagactcgagcccactggttgagaccatacttggatacctgcgatcgagtcagtttttgtcacatcaaacgttggctagggaggttcccagtgggtcataaataacatacggctgcccgaagcacttcatcctcaatgttggtcctagaaatatgttagcgacgaaagctcgtgggcaggttccaacagtggcacttaccagacacctcctttgacgacaggcatggcgtgcgatcgcgctgagcgcaatgtcaaaccttcgaaaagcgatagtaaaagatcaagggtgccaccaggaagatgaaatatgacaacccactggcgatatagggagttcacgcgccggaagtgatgacagcttgaagcggaagaaaagcgagttcgatgccaagcgcggtaaacgtggtagccgcgatcaccgcccccgcgcgtgctgagataagcagatccagaaattttttggaccagaaaaaaagataagccgatattttcatactatcaacgccgacttgtccgtctgttgttttccacaatgtcgaccgccgtggacgccccgaagcaatttaaacaaccttctcgtaagggaaagaaggcgtggcgcaagaatgtcgatatcaccgatgtacaggagggtttgcgcgatctgaaggatgccgagatcacagggtatgtctacatctgctctttctttttcgttccggctctctacttgtgaattgaaattctaactatattctccttgtagtggtctcgtatccgagaagccttccgatcaacttttcgttctcgatactgtcggtaatgaagaagtgcgcaagtctatcgccaaaaagcaaaagaagcccctcaagtcagacgagatccttgcccagcggtcaatgatcccggccctggatggtcggaaacgtggaaaccccaacgtcaccgacggagtgattgagcccaagacgaagaagcccaagagtgactgggtcagccgtaaggactatctccgcctgaagcaagtggcgaaggaaggaaaccctctgggcaagaagaatgaaaatgaattctacgatccatgggcggaagataacgaaccctcgctcacgtacgacgaccctcgctttgatttcctgcagaagcccaagcccaaggttgagccggtcacattaaaacacgccccgatctcacttgctgccaatgggaagcccatcccctctgttaagacgccgcacgccggaaccagttacaaccctgtgttcgaagagtgggacaaactattggagacacatggtgccaaggcggttgaggccgagaagctgcggttggaggaagaggctaaggaagctgagaagcggcgtttgatcgaggaggccaagaacgacaccggagaggtgaaatcagatgatgagagtgcctgggagggcttcgaaagcgagtatgagaagtccgagtggctgaacaagaagcgtcctgagcggaagaccaagacacagcgcaacaaggccaaccgacgcaaggcagcagagaggcaagcgaagtgggaggcagcgagggtaaagagagatgcacaggccgagcatattctcaagatcaccgaggaaatcaagcaacgggagctcgagcgccagaatcagtcggatgcagatgattctgaggatggtgatgatactaccctccgcaggaagaccttcggtagcaagagacggtacgttttcgttcattttcctatacctaccttgcgactaacaggttattttagcgtacccgagaagccattggagctggtgcttcctgatgagctgcaggattctctacgactcttgaagcccgaaggcaatctcttggatgaccgattccgaacattgatcgttcagggtaagctcgagtcccgcgcaccaattactcaggcacgcaaggcccggagacagattacggagaagtggtctgcgaaggatttcaagactgggtacgaatgattctgcatattccctctaaaagcgcgtgcattttgttatctggacatataatgtggtcctaaggttagataagttaggatcaggtttcatctcaataattttcaagcacttaagaaacactcaattggtacctaggtatacatgtcgatataaatcgtagatagtacaggccatatagcagtatataagtacttaagtacctggctatcaaaccccaaaataaaagtgggtcccgaaaatttactagcttatcgtctttttttatctttcccatcttctttctcaccaacagacacagaatggacaagacggcgctttccagtaattggaagaagttgcaggcgaccttgaagaaagattctactgtcaagcgcaagccctccgatcgcgactccggagatggcattgtgaagaagcgaaagttgacagagaagcaaaagccatataacaaagacgccaaaccaaccaagcgcaagagaatgtccgataagaaagagactggcgattcagccggtgcaccagccccaaagatcgagacgagttcgcgtcacaaggaaaatgaaggccgttcaccaacgtaagttctagaccacagatcgtccagccatactatttggactgtcctttcgctgccagctactaaatatcaagctccagcgccgaactaggaaaatatgtcgcaatggattgtgaaatggtgggcgtcggaccaaacccggacagtgactctgcacttgctcgcgttagtatcgtgaacttcaacggcgaccaagtatatgattcgtacgtgcgcccgaaggagatggtcacagactggcgcacgcacgtgagcgggattgcgccgaaacacatggtggaggcaagaagccttgaacacgtccaaaaagaagttgcagatatcatgaaggatcgggttctcgtcggtcatgccgtcagcaatgatttggacgctctcctcctcggccatcccaagcgcgacattcgagacacgagcaagcacgcgccatatcggaagattgcaggtggtggatcaccacgtttgaagatcttggctgaggaattcttgggaatcaagatccaggagggagcgcattctagtgtggaagatgcccgggctacaatggctttgtatcgtcgcgagaaggatgcgtttgagcgggagcatttgaagaaatggcctgctcggatgattgccgacaacagggagaagggtgaccagaaaaagaagaagaagaagaagactactcgcaagcgctgatgtgattgaatcttcggtatagctttcgaagagacatgcttaaatactctgtacatgtataccccgaccattgccaattgaattgttttgcatttcgagatttggaaagactgtaattcattacccagcgacttcaaatgcattgaaacaactataatatacctgtagagatggccaagtaaataattgtagtcgtcgatctcgaatttccacttaacgcggagaacgggagaacgcgtcgcgccgcacctccaatcttttgcaagaatcatcgcaaccacccagaccgcagaacccaggcaatatctctgcaattgcagatttcaacgatataagaaccgatcaccaaccaattgatcccagtaaatatactggatcacactgttactaccccacgagtcctcagaccagaatatccgtccaagaacattcaacacaatgcccgacatgtacgccatccagccctgctcaaaagcgagctcacaatccaaaaagaacgactcaactccgcaatgcatgccaaatatcattccatgccggattcaccacgatggaccaattgattcattggatcggtattggacagtgaaagacgaaaaaggtatgcaagacagacagcataggctggagaaagtctactggaccaatgtgcaagcaaaaactaacattgtcttatttatatccagataatacccaaacggtgcatttccgcggacgcaaacttcgaggtcggcgcgtcgccctccccgatggttatcaaggtacgagagaacgtccaaatgagctctcagaaatatacaagcggtaattgaatcatagttgactgactatataccattgcaaatacaggtgtagtcgcaacacccacagaccgcgtgttacccgcagctcaacgggcagacagcgatggcgctgaggatgcagaggctgagcccgaggaagcagtgaaaattatggagatgcagggcacctttgatgactttgtagtatgggggcatgagactcttcctgcggcggatgatacttttgtcaagggagtggaggagtggctgcagtttgcggacgcggtatgtttttattccccttcaattatggtctatcaagatacttttttaccttggttctttcctgactgtctattagatgcatataaccccaacatcagcgactaatggaaaggagtctgctgctgcttgaagaatcctggacggcttgttggactagaatggagttgatgcgggaatttccgtggatttgggctaaatattaatgaatctgatagcataattctctgagattcacttactactgcttgaaacagatcttcttacaaccttcatcaagtatgaaccagatatgtatgcgttgaaggcttgagaccaattggttttggctcaatgcatccaatggatacatttcgagggctcaatgtatcagaatatcaaagcaactacagtattatctagaccatttctaacaacaaaatgaattatcaaggcattgcaacggaatccatcatccatcttatagatctacaccaaaacgataagcctgaccgccccacccgataaagctggataaatcgtacaaaacatcttgaactcccctacatcccaccattgaaacgcttccaaacatggccgacccccaagactccgacaagctcgccccggaggcactaatcaccaaattccaagtgagcaagctcctcaaacaaggtccgactcaaccaccccacctccccgcaacaatcaatagactaaaagaaccacccctccagaccaaaatggccgacgaatcgccctcctaggcacaatcgacaacacccaaggcatcctaatagccgagcgcgccgcattcgcaaccgaatccctggccgtgctccaagccttccacgccgcaatctcgcgaatcaacaacctaggcgacaacgacatctaccgctggtaccttgcctcctcaagcggcaacaccaacgacccgacaccggcagaggccgccgcaaaccgccatcaagacctcaaactcaacctcatctggccatgcacagcacagcacatcaagaagtactcggatcagcagctgcgcatggtaacagagacggcggagatataccgcacgcacgtgcggccgtacatgcaagcgaagcgcgaggagggacgtctgaactgggtgtttaatatcctcgagggcaggactgagcaggaaggtgtgattatgcgggatgagggacacgggcctgaagatgggtttttgatgttgcctgatttgaattgggatcggaagagtatggggtcgttgcatttgttggctttggtgcagaggagggatatttggagtttgagagatcttaagaagagttttgtgccttggttgaagtatttgagggatagggtgcttgaggctacggtttctatgtatcctggcttggaggaggatcagattaagctttatgttcattgtgagttgttgtttgggattggattgcgctgtattgggttgtgttgggggttgtttttgctgacttgaatctcgcagatcaaccgacttattaccatttccatatccatgttgtcaatgttatgctcgaagctggtgcaacgcaggcaacgggtaaggcttttggactggagaacttgatctcgcagctggagactatgtctggggatgaggatgctagtctggctgatgtcgatttgacatactacctgggcgaagctagtgagctgtggacggagatttttgagcccttgaagcagggaaagcagcctagtcggtagagggagttgtttgaggccatgtcagatacatatcgaacgaaagttctaatgaccgaatgaatcgaagctaacccattccatttttacgactgcaaaattgtacatcccacgacgactctcctcactagaaagcattacattatacaacccccaaaaagggggtacaagtcaagataataagatattagtattcaatatatacgttttttttcttcttcggtcatatctacatatacgtcaattatacatgttccctcacatgcctctccgtcgaagtctgcgtaacctcaaacgtgcgatgaatgcccaacccgatatcaccctgcaactgcaaccgaggcgagggccgatcaatagtcaacctctcctcgctgctactcgggctcggagcaacatatgtatcctcaggatctctctggctctggatagtcgtgacagtgacagcaagcttatccggtctcaaccgagactgcccgctctcatccagcgagcctagaggaaaagatcgattttcacctccgcccaactggcgcgaggcagaccgtgagcgcccggcgggaaacccagtggagtagtacgggtctgagtgagagcccgtccacatgcggaggaggggccggagagttgcgagactaccggctgtaatgccgaggcctgcttcgatgttggaccagatggcgatttggtatgttgcgtctagaatgaggtgtctggttagtcttgtttcatgttttggtctatgtgaccgacaggatacgaaacgtacagaggaaatcggggtcatagaatgttgcgacgaaggggacacggacgataaccgccgatgaagcactatagaatcctctcgtcagtggtctggaactagtatggaaactcgagaggaaaacatacatgcaagccatgcttaagatgcccatgacggcgatcttggtcttgcgcttcatgtgaagtttgtggacgaggaagatgggcaatatgccgacggtgaaatcacacagtgcggcaaatgcactgtatatgtaggtcatgatcacgatgatcttcatatccatgcatgtgcccacgatattagggtcgtaggccaacttggtccagaagtattccagtggcctgcactggaggagcatgaggaacatgaaaaccaggcctgcaatgacggtcaaggccatgacgcagtagaggagccagatgtggaggggtctgatagtgatgcgcatcaggaagatgcagacggagatcttgcagccaaccgaggcgaagcagtaggcgatctcgcagagccaccaatatttcattgcaatgacgcggttgtggacagtgagattttcgagcatatagcctgtgccataaattgtgcccccaatcatggttccgcagaacatggcatagaatagctgtgatagattgggtttgtcagatctctggtatcactccacagaaaagtcccggaattgtctcggattgaaagattcgagattggacctaccattgcaatcaccatagccccatcatcccatccaaatgcctttacgatccaaccgcgcacgtagatgcgtagcatcaccgtgatggtggcgatgggcaggaagaccgcggccacagcctgaaccgccgtgcttcttaccttttcatctgtcatggcggcaaatgcttgtcatgtcggaaggatctaaatgtgggggagaaggattcttaataaagacggcctccttgacaggacccgcgaaaaatagaaaattagaaaatacaggggcaaagaggaactagagcgttttagctcatttagctcatctagctcaattagcccttggcccagaatgccttttctagtgggaagaaaaacaacgctaagccaacgttgatatgatcgacgacacggctggactcatgaccttgtcgggtataaatagggtcgactaagagccgctagatgtcaatccccatcgagttatacgagtataggatgggatactattaactacggcgtaatatatgcgcatgggattagaaactgccgagcctgcatgtgggaggtagcgtgcggagtgccggacatttcttcacaaggaattccgctagggtttcatagtactcgcttggctgtttctcggcagaggtgtgcgagagttaccatctcgttgggtcgagatgtttttgtagcttcgtataacttgtcccgttaacttgtcccgttcccagtttcctgcaagccccgaaattgacatggggcccacgggaagtcagcgtgccaatccaatcgctaccggtggacaatctcctcggagggaccgcttttttaaggaggcagagtggcgatcttcaggctgacgctaacggtgtgcactagtgccttggaaacaatggcattctttggtcttcgtacccgcctatttagcgtgttgactttgtcatagcccttgtacggagtacaccgtaactcctccgtagctgtcatttgggatcttcggtgtctcggtgtctggatcaacgttctcctttttttaagggattaaggataatggcgatctgaatgacagccctaggaggtttattccgtcgaatccaaatcaattttaacttgggttgctattaatattctctttttaattctctttttaaaagtgactcgtgcacaacggctttcgtccggaattggtggccttgtctttcaggcttcaacgttttgcaatttcgggaattacccgatgcagatacataatatttatgttgtacctaggtatgttcatattatatctaatatataatactatatttcatatctaatctgtcaaagctcaaaagcaaagcaattaaaagaactacaatatacaatatagattaaaagcaattaatatcgaatgccccctgcataactaacacgtgggaccccgcaatccttcaatccttcccccctcctaacctctaccttatcccaaagacatactatcataataaccaacattgaaaccacacacataatggcacacgtcgatgtcccagaaacccaaaaggcctttgtgccactaggtccgacactcaacccctcacctccaaacccccaaactaactctcaacccagaaaacaacccggaagtaatgtcccacctagtgcaccaactaggcctggccccaaccctaggcttcacagacgtattctcgatcgacgagccggacctcctagccttcgtcccacgcccctcccaagccctcctcctcgtcttccccgtctcccaaacctacgaagcctcccgcgaagccgaagacgcctccaaacaaaactacaccggctccgggccctccgaacccgtaatgtggttcaagcaaaccatccggaacgcatgcgggctaatcgggctgctgcacgcggtctcgaatggcgaagcccggaaacatgtcgtcgccggctcggatttggatacgttgctccgtgaggcggagggactggagcctgtgccgcgcgcggatctgctgtatgatagtaaggcgctggagagtgcgcatgctgatgcggcgaaattgggggatacggctgcgccggaggcggaggataatgttgatttgcactttgttgcttttgtgagggggcttgatgggacgctttgggagttggatgggaggaggaaggggccgctggctaggggggttttgaaggagggggaggatgcgcttagtgaggcggcgttggagttgggggttaggagatttttgaagatggaggctcagggcgggaatccggatttgaggtttagtttggttagtttggggcctttgtttgattagagtcccaagggggattgaggataagattgatttttgagagagcgtttctggatctggtatccgaataggtagtatgcctttcttgagctgtgccttgaaagcagtggttgttattaggtacatttatgatatgtgtctgtgtctgtgtctgcattcctttgaaacaatcgtcggaatacactgagatgtgatatatgtaagtagatgccaatcgaaaatcgcacacactttgcaaaccgaaatggtcaacccagtagcccagtagcctaccctctttggtgctccatgatatcatcagcagaagaaaccacagaactggtgttagcagtaacagccgttttctcaccagcctcctcgccaggaattaactgatcattttgcgggacagaattgccctgtttaccgattgtcaagaacggcaccaaaaccagagacacccccgaagccgcagctgcaaaccaataaaccgagaggtaaggctgaatcgcaggcgaggaggccgtcatgcgaagagcgaccgagctttgtaccgaagtagcaattccaagtcccagggtgctgcacagcttgttgacggtgttgaagatgccgccggcgatggattgctgggatggcgggagggtggacatcacgtacatctagatgaagttagccaataccctcagagacagaacatattgcagaaagataaggaatagaaaggagatgggggttgagcgtacatttgtgacgttgaattggatgtcggcaccaacaacgacaagaactagcccggggaagataaatgcccagtaactggcttcctgcttcataaaactaaggataaggaacgaagctgtatacgccagtgctccgatgccggttaatactttgttgcttacgcggtgcaggaccagaccgcagacgacgttgaccagcaccccgctgacaaccattgggagtagctgtacggtaacctcaagggcagacagatgcttcaggtcttgaaggtagagagcgaggtagaagctgacggcagagaaacccataaagccaaggcagcaagttccaatgagctgaacagttagtttccatccatatttccatgaaattaggcacatacaagagagaagttacgatctcgccagacccaaagaggcattagagggtgggtagcaatggactgccaatacaggaacgccacgagaaggaaaaagcccacgataaacagggcaaggacgtatcccgttttccagccatctggtgcatctgcagcgagactataaaagtagtcagcgtgaaggccaaggtaaccaattcaacaggggttaaaagaacatacgaaagcgaactggaaaagaacgcgaacccaacaacaaccaacaccatcccgagaatatcaaactgtttcaaagcctggacactcaaaggcgtcctagcaaacccatcagccggcaccgtccacgcggtcaaaacggtaaagatagcatagacaacagcgagagcccaaaaggaagcgcgccagttatacaaatgcgctgcaacaccggagataatcatgccgccgacaaaaccaagcggatttcccgcgctgaagcaggcaaaggcaaggttcttgcgctttgagggtttctcataagttgtgccgagggcaccaacggccggtgggacgacggctgcggcgaataaccctaaaatccccgagaagacgtccatataaatggcatttgttgcgaatccggcgatgagtagcgagatggtgaaaccgcccatgccgattatgaagagtatcttgcgtccgaacatgtcggctagcttcccgaaggtgaggaggaaggcgccgcttgtgaggctattcgggttgagtgcatggttagtggtttatgttgtttgatatatgtctcaaggttgtatgatgtatatggggataggaagagatccaaaacataaaaagccgcgagaaactcaaatactgaaacagagataaatatacgtacgaagcaccggcattgatccaagtaatttcagcagaattcatatgcaaatccttgccaatagatgcggttacccccacgatacagccctggaagaacgactgctggccaatggccattgtggccgttaggacgaagagaacttcttggaatgtgctggtgaagcattttggacgctccgcactgtcattgactgaaccgttttcttgatctttagccatctccaaaatcataccgagtagaagattttgttgggggaatctggctattcgatgaggctgaatccggcgggttcaggggtcacacgctaggcttttgaaagtatatgtagtgtgaacaaagccattctattattgtaattgagtcactcgatgtttataagtctgataagaacacagttgcattgtattttgtcagcgcggcaggagttccgcgctggttgcagatcgtgggattaagccggtgtgggcccataggaccgcctcgatatgtgttgtatagttatgtgtgcattgcgaaccatgtacaaactgcaccaagtatcatgaccatatacacataagtgccgagtcaaaaggtaacccctccttgttgacagcattggaagtcatcaatgtatgaaatcagaccgaaccaaaacccaacttgcatagtcatgcacattcaaccatgtctctatccctctcactcccaagatctacccagcacttacgggcattgaaccggaggacctcattaccagcagcccaccagccagccgtcaagttgcgcgcaaaaacctcgagggcagaatactcctggagatgaccagtctccgtgaaaaacacattctcaagaatagatttcaggttcggtttacgagaatgtaagtccggaaccgcagcgatgactcgtctcgtggtaatggcctcacccatgcgcgtcaggtcatctgtttgaggcaggggtgaggtattgttggcagtagcgttggcgtcgacattaaggccactcttgcggccaataacaaggatctcgtacggtttccgccaaagaccgtccagtgctgagatcggttgtccgtcccacgtggtcttgacccagatccattcctcgctgatggcaaagcctgcgtcgctcaaggcctcgtatgctgctcgccgggccttttcagcattcgtgatccatatagcagctatagactgttcgctctggatcgcgagtccggggtgggtttcagatggatgtggcccctgctttgttttggggtagtgcgaatgtacacggagtatatctcgtaagccttcggtaagcacatccatctcggaatagtgatgtgtttggtagtgtctgctgcgccgcacagatttgtttggccagggcgggtccatgaggatgagattaaatttctggtgatggggaagaccgggaatgggatagttattgggtgtgaatggacggtcgacttcggcttgaaatagaggcagtgtacatagcacaaagctcgactcggctgggaccgtatattcacatggagaattcgcttcagcacggtgccagcttccaaccctgatgattgcgggctctgatgacggattcttgacaatggctagttctgataaagcctcgaaatcgttcggtgaggtggttgatagaattattggtggttcatttttagttgaatcgtgatcatccggcgcagactctaaccacgtataatcatatcccttccgacgcttccgtgggtgctgatttggctctgtgctatcatgaggttgattaggcacagctcgagcctcgcaccatgggcgatcatggggatatccagccttgatagtctcgagagaatccctcacgagtggcagtatcagttccgagtggaaccgcctctcggagataggaatggtgtcgaggaccttggcgagagcagctggctttttaggctcagtagaggggaaaggcgcttctataggtgagcatgaaagtagtttccgtatctttctatgtgtgctcttttctgttcctgaacttgattctggtgctggttgttgtgggattgacttcccttcttgcgcgagcgcaattgaatgcgggatgtcgacgagatatatatttttatcccggaagagaattgctgtctcctcttgtataataccgcccatcctgggctttacctttccctcgttgggtgatggtgaaaatgagcgatgagatgtcgccgggtagttgtggaggtcccaggtcccggcctcatataaattcaatattggagggatcttaataaagctcattctctcaaattcgatattcgatatattcacattcattacgatatagtatcttttcacgtctgcatcaattcactatggtccactaggcagccaacatctcgatcttaaaacaatagacagaagagaaaaaggcctatcgtaagatcacaagagatacaaggtcattcaaaaacgctgaagatacaaaactgggcctccacccagaagagacacaagactttttcaccaccggttccctatgcatagccagttcctctcccgggtccgattctcccctgccggcggtccagcgtccgatcagggcgaagagataggacaatgaaatcacaacacgtagctagataaacccgcttggtctccatgagaaacttcaaaaaatgagaaaatagagaagaaaataagatgatcaagaaaaatttatacatgtagatgtgaaggcagatcgattagaaatcatacgcgaagacgggatcaacgctgggcacaaggcatgcacgttagtattgccgcgttacacggtttagggtcggtccgagaatgaactcacccgtccacgtcggcctccgcccggctgcccctgcacagactgtgcctgggggtagtattgcggagggtattgatacatctgggcagggttgacaacggggctgaactgttggtagttgttctgagcaagcatcgggctcggactcatctggcccggtccggcgggcagcgtggaagcctgctgcggctgcagggatcgcaggttatccacagcaggcgaaccagctgggtagccgtagttggcgcccgacatgccaggataacccgtgggaacgccacgagcttgtgcggcgaggaaggcttggtattgcagctgttgctggctcagggattcctggctgtatccgcctgcaccggaaaggccgttcatgtggcttccgaggccgttggtcgagtatggatcaagcggcggggcgttggtctggtcggcggagataggacggttgtccgggttctgtccaaacgtgttgggagcaaactggccattgtactgtctgtccatggacggctggcctggataaccagtgcttccgtggcgggaggattggcggtgttggggtttctccggggtggagtgctcacgtccgtggtgatgctcccgaccgctacctcgtgaggagaggcccacttcatccatcagacgtttatagccttggcttggggaagctttcagcttcgtgagaaccttggacacgttcttcacgacttcagtgcgcatagactcgtcaaagaacggggtggtcaagaccttgaagatcagagtcgcgccagatgtctgatcgctcagaatcttctccaagacttcatcgccgggactgaagaagagtgcctttagaacaatgtctcgggcatccggctcgttgcgctggttgatcaccttgagaacagtgagataggcaaccttgtgggtacaaaggtgaacaaggtgaggcacgagtctcggggccagcacggttcggcggcgagggaatgtgcacgtatcaaggaaccaagtgagcaaaagagctccgttggcattagtagccaactgcacactgtggagagcgatggcggatgcgagcatccgctgctgatccttggtggcatggtggctttcgagacaagccctcatcgctcgggcgccgaaacgtccctgggcgatttcccacactcggctgagcatagactcaaagataaagctgttgaaggggctgccgaatcgcaggcagcactgcaagacatagtttccatactgatccaagaaaagagggacagtgtaagggcgaagagcatcaacaatcaacttcatctgtgaaggagtctttgcaacatcaatgatcttctgtgcagcccaagttccattcttgtgaacaccaatttcggagagatggggtgcaatgtgagtcagcatctgctccttggtggattcagagcagaattcaaacagtttctgaactacagtgttgcccaaataatcggacgctagctctgcgatctcagggagcattgcctcggcagtctcctcaatttcttggatcgagcatgcgccattgtcaatacgcttccggatgtctcggagacgaggggcgtcgaacatccgggactgactcgtttccgggaccgaggggatctcatcctcgaaagctttgaatgcgatggaagcctggatgcttgccgtgatgttcttcaagtcatcttcgcttgcgccgaattcttgcacgatttgcaccatctcaggcaacaggtcagccagagcgggaatctgagggataacgttagcgctatccgctcgatccgccccatctgccgctgcaaggtttgatctgaagttttgttcaggagtaggagatgactggatgccatttgcaccaggcgtaccagtggcggatgcaccagggaccttggcataaccaattctaacggggcctgcgcctgggaaaatctccttgccgttgagcagcgacttggcttgcacagcgctatcaaggcgatcgaagttgacaaatccgcagttcttgtgagttagaacacgggtcgactcgatctttccatacatgccaaagatggcctccagggatgtgacggtagtggatacgggaatgctaccaatccaaagtgcccgggtaggtccatcctggttgttctcatccgccatctcaccggccggtcggccactcatggcaggaataccgttaccgccaagatgcattagctgaactgcctcggacaattcgtcatattcgccattctcggcgatctgcaggtcagaagcactgaagctgttgtcaaggcgggaaggtgttgcgaggtagttgcggatggatgatcgctggggaggtgcctccaaaattccagcagttcgcgcccggggtctgctaacagaggcatggctagcaaaagcctggacagcgaggttatgctggtggatctgggcctgtgtggcggcaagttgcgcggcagttgcagcggcagtcggcgtcatagtgcccgagggaagttgggagtaacggttctcatattcaagatcctcatcatccgcgtatttctccttagcattgacagagtatgatcggaatcggttattgttcttcatcatcgccaactcagccaggagtggtggcagcgcagaagcttgctgttgctgctgctgctgttgcatcaaagcttccatcgaaggacgtgcaagagaggacattccctgttgaggggtctcggcaagccccaggtaatccagggtcttcacatcggtatccgcgagtccatccctcgagaaagaagagtggctgggcgaagtcggtccttcggaagatcgaatgcttgttaaagttgtagctctctcacgacccgtcgaccagttggttgaaaacagtgatgggccgaaggggccgccacctcccaaaaagttgcttctctgcggcatcgagccagctcgaaggcgggatagcgatgccgggttgggcacaccagttgaactcgcgaccttggaacttgtatctatcccggaaacaccggggggtctaaaaggactcgttgaaggcgttggtcgtgaggtctgcgacaggtaaggctgttgaagatccatctcattcagtgtgcccattggagggaaacgagagggaaccgttccagcgcgagctcggcggccagggctgtccatggagccattcgtggtaggaatcaaatcgggaaagctatcttgactcggcgattcgggaatattctcgcgaagcggggtcgaatggccgctagtaggaggtccccaaatactaggagaaatgccttcttgcgcttgaatttcacgggctctgcgagaagagtccaaaagtgtcagccgattgtcgcagttctgtgtcccacgggaagcaaacctaccgcttcgagtacagacgcgatgtcagatcgtgagaaggggaaccagcccctggcctcgaactgccaatagaccccggagaaggtccaaacggcattcttgggttcccagacccggccagatcactgggagagctgcgccccgtcgaggtaccggacatgggttgggtggttgggatgtaattgaaattcatctgaccgtcaggccgcgaaaccggcaacattatggattatctctttatgccttcagcaaggcagtgcccgaatctcttccacaaagtatgacctccgcgcaaatagcaaaatagagcaaggtcggaaatcaaatgtagcttcgttcaaaaccgtgggatagatatcatggaataaggatagagcgaatgatcgaggacacactagagatcgaagtcgaaattagttggtgttcgaatatgtgtgttgttattgggggggtcgcaaagcgggaggggtcgtcaaagcaattccacagagtcgagattaatcgtggggatatttcataccgagaccgatgccttccaagcataaacaccactatgcagtgtcgagtgtctttgatgataatcttaccgtttgctccgggtgtatgacaatctgcgggtgtcccaaagcaatcgagttgaggtcaaggggagaaaaaaaaaagagacaggtccttttctatagtcgtcaaaggctcaaaaacatggattcacaaggatggtctggcacgaagtgcgtcaagtgagaaagaaaagatggaaaggatgatccggttccaaagggatcgaggtggctggaagtgagtgttgcgctccgagagtcttcaacactaaaagtcgaattcaccctaagaatgcagaaagcaaaagaagaagaaaagagaagtgaggaagaagtcaaagggaggatgagaagcggagaggaaaagaaggaggaagagagatgttggggagctggccggatgcccgaggaagatggctgtggttggtggagggccctccttcagcttcacccacaattcgatagttgattcagatgaattttggtttaaaatatgggatataatgggatataagggatgtgattgaatgattgaacataattggtttagattattctatgactatatggttggcttcattttttattgagttatggggatgttcaaaggtgcataagtagctacatatgtatgtagacatctataaagcacaatactccgtacttcctgtacattcaacattcaaacctccagacggaaacaaatatcgggaatcggcagttcctccaggtgtttggcaatagcacagccccatcgatgtcattgttttgcaggagtctccattctggttcggacatggtgaagtatcaacaaatctacatatccaaaaaagtatacgtttagtacaagtacaaggcttttataaccccagaatttccctcccaaagaaaagaagaaagtccaattcaaggttttctctcggaagaaaagcgctggcatgagcacaaaaagagagacaagagtggaaacgagaaaaaaaagccccgcattccagtgcgtcatgccttgacgcttgaatccttgacagatatggttgaagactcatcatgaatgcgaagatatcccacctagggtatgggatatgatgcaaccagtcatgtaaggagaatgaaggttttgtaacccaaaagactgtccacgggtgttttgagtgcaagggatatgggtcaggtacgtgtccttgtccttgttcctagaggcgtcagccctggggccctggggtcggtcatggtggctgtgtgtagagacgtaactagactaggttttatttgtcaattagcttgaagaactgcaggctgctttctgcatcttcaaggtgttcgccaagcttccagaagcattacggtagaagaaccgggttcatagcatggtggtgtataatagggttatcacttctagggtgataatcgagtagtatcagccactatcacaatcgaggtatgaccaagtaacaatcagagaaaccttccaatgttgtgtcgttgcttcaaggtcgatgtaaacacgttagttaagacgattggtcagaccgttttagcgcctgaggcaccaacttttctttcgcgccactacctgttcaagccatccttgccaacttgcccgcaacagtatctttccatcacttcaacagcttatgtttaattgtgtggaatctacattctatatgccataattttcctctaatttttgctgatcattgaaacgcgattcaagtttagtttgtcgcgtgcgcgtcccctttctcgcgtccgatgcttaatcgtccattctaaggcacccgccaccccagtaacaccatggccgacatgatggaagaagacccgtcatccgggcttccatcagaggaagaggagatgcccgtggagactttggtcagagggcgcgcgaaacgaagtaccgccggacagcacatgtctgccctccttgaagccgctgccgatgatgacttggctcttctctttgaggaagtcgaagacgataacgagtttgcggatgaggtagatcctgacgcagaggatgagttgctggaatcgtcggacgaggacgaggaccaaggaccgaacgcgcagaacgactatgagggcgaacagaaactacaaaaagaggagcggaagaagcgcagagcccagaatgacctccggttccagaccttgcgcaaacgagtcaagatcgatccgaccgccccatccgccatgcccgccgctcctcggccgaagaagaagtcagagcgcatttcctggattcccacggtggaggatgggcctactcggcaatcatcgcgtcgacagaccatggtcaacaaggagcttacgcatgctcgtctcaaggacagccaggagaaacgagtccgcattattgctacaatgaaggaggcagagaagcggaaggcccatttgaaaccgaaggagatgacccaggaagatcatcttgcggaggctgcaagagtggaacgtcttaatagcaaaagcttgaaccgctgggagctgtcggaaaaaagaaaagcggacgaaagacgagcgaggattgaagcactacaaaatcgccgtcttgatggtccggtgatttcctactggagtggtgtggctacgtggacaaacgggcgtctcacgcgggtgggcaaaattgacatcaaaccaaaggcagataaagaagaatcgaggaggaaaaagaaagagaaggaagataaagagaaggccgcatctgagtcaaaggccttgagttctgcaaccatcgctggacccacccctgtctctaccacaggcacatcacaaccaccgtcagacgtccatgcagctgctggtccagcaaatcctgctctacttcctcccacctccaccttagaccaaacgacgcctgaaaacaagtcacccgaaaatgctgcagcgccgactgcagatattacagacacccccgtagagtcttctggggcgaacgccatccaaccaggcgcaaactctttggagaagacaatcaccacacctcctgccgagcagggcaaggacaatgtcatggaaaggaaagctccagagcttagcgcaaatacatcaataccaccctctgagcgagatcaatatctcaccgctgagagacagtcgtcggggtcgtcccaacattcggagaggaaaatgtttgctgtggaaattccaacatctcgtcgtgtatcaggttctgcgggcaatggctctcctcaaaaattgcctgagccgccctccaccaagaacgacgatgctatggatatcgatcaacctccagcggctgcagcggctgcagattctgccaggggtaaccaagaaattccagaatcaacggaccaggcaagcttgcccacgccgcacgttgctgatgcccaacccacttcggcagacactcctgtatcacatgctgctgagacgactgtgcgagaaccaccgccactggccgagtctcggccagttgaaccggccacggctatcagccctggaattgcactggcccctcaagcctcgccggccactgcaacacctagtcaagccgcggtgcccgaaaatgccccagttccgagcctaaaccaaccatccacattgcagaccgaaccacaattatcaaatggcatggtgaaggaaccagcgccaccagagattccagaaccacctccggtgattgagcataccgggcgctgtcttacaattttggaaaactttgattatgcgaccgccaaccatcgcaaatacagcatgtacttcaacgccaagaagccggctcgtttgacaagtacgtatcatttcgattggttaagaatgtgtaaggctaacctcgcataatagaaatctcgtcatcgctttgcgtcatcacctcattgccttcgcgttaccgcgatccagagactgcgctcccttacgccaattcatacgcatatgggcaaatccgccgtctgctaacggaagggtatatatggagctcgatgcttggatgctttgtcgggccggccgaggctgcccgtggcgtgcccgagcgatttacaggcaaggcaggtccaggtacagtaaaactactcgccgacaatgatgagggtccggccggttcgattacagggaagacaagggtcgaccgaatggccctcaacggcgatgtttcttcgacgcccaccccggccgcgactcgagcagcgcccccagagccaatggagattgacaaagcttgagcgattatttgtataatcgtgactaagcattcacctacacccgtcccgcgtgtaggtgagccaatgcctaaacacaaaccaatgcctaaacacaaaaacttcaaccttcaatttttgtccttactttttaccaccaaaactatgccaatttcatccgagaaagaagagattcttctttcaaatgccgttgaagcctataaatcaggccaattcaagagtattcaggccgcagcctctcattttggcgtctcaaagtggaagcttcggaatcgaagtaacggcacgcctagtaaaaatggccgtacagccaccaacaaagcactaaatcagtcgcaagagagatccctgattcgctggattgagctgcttaattcagtatatacaccaccgactgctttagacattgagggcgctgcaaatcgtattttacagcactacggttccgaccggcaggttagtaaaatgtacggctaccaatttatcgcgcgcctaccaccgcatatcactctccgtacgcaaaaacctatagaaaaagcgagaatcgaggccgaattatatagtgaattggttcattagtataaggtctttggccaattccttaaaaagaataaaattcaggcccacgaactctataactaggatgaaactggctttcagctaggcgttggaactaaggaaaacgtcgcttctacccgtgaaaataagacgattgcgaccggtggtataggccagaatatcactagtattgaatgcatttcggccgatagctgggttatacatccctggtttttaatgtgtggttctgaacaaatagaagattggttcgacggcgataatgacccttctaattatagggtcattaaaccaactgctaaaggctggacggatgataaaactgcgattcaatggctattggacttctattataccaccaaaaagcgagttgccaaaggtagacctagggttttggttatagataaccatagttctcacggaaccccggaattcgaatacctttgccaatcccttaatatcataccttggtggtttataccgaaattaacacatcgatgccagcctctcgatagcaagccattctcggtccttaaacagaaattccgaaagaagaataataagatcgtccgatagggtagagatgttgataataaacggcattttcttcggttgattaaaactattcgcaaagacacattcaaatcacgaactatcaaatcatcattctataatactggtatttggccttagaatccacatattgtctgtgatcaaattgatcctagctgggaagataaaccagtgcttgagatctatggtcatacaccttcgccagaggcggaaattcctagctcagtcacgaattcgccgccgaactcggatcaaaggttctcaaaaattgagaataagcttcaaacgatattcgaaaacgacgaaccagaccttccgaaggttcaaaagcatataaaccgtgcaattcgtggcggcaagcaagctatccaagacctagcccttgcaaagcagacgattaaaaagatgcaaagccataaaattcctgtcaaaagatcaaagcgtattataaagggtgcttctaagtccccattatcgtcaattgcaggcaattcgagggttcatcgacgctgtacgaaggaaacaaaattggacattgggaatgagagtgcgcacgcaaggattcgagactactggcttcgggccaaccaagctctcaaagaaaaagaagaggcatcaggaggtagagattatcttgatgtagaagatgaggtcttcaaatatgtaaatatagatagtatggtggctgaaaaataggtctgaaattgaacgcatgaagtttttgtgtttaggcattggtttgtgtttaggcattggctcacctacacgcgggacgggtgtaggtgaatgcttagtcacgattatttagtagatacccagatagaattgagaccaaagaacccaaagtggacgtcaacatcatctcgtctccacatcgactgatggaccttgttctaagactctgcagacttttcaacgtcaaagcttcagtgttatgatgtattctatgttgacagatgtcaccgggcccaccgattaaaaaaaattcaatccaagctcgcccctattatatttatatcccgacctggtctatccaagggacgatttcggtacccggcggaaagcaaacagggaaagagatcacaaacgaatcaaatgggtaagttatcttctgatgtaaatagggaataaataacttcgaggccttctcgaaagcctcggttttccccatagacccgaaacacggaagatcgacgattagcaccgagtctggaatgatagtcccacatctgctaggaccacacatgtcataggcagacgtgtcagtgtggcacttggtacctataccccacagagagtctcgattgttcctattttcgttgtcgccgtagccggcagttattctgttgctatcttaaacgttatcttgtgcagatataagaacaaaagtatatgtaaatagtgggcaatgatgtattttatacccacctgttcacgccatctgggtatatataaatccttgaactcctcgaggcatttatggcgtcatttagaatgttgtttcatctatggtatatggtatgttgtacaaaaggtattcaactattcaagtattagcttgtagatagtgattgtcaggaatggtgtccaatctatcacaccagatccgatcccccccggagggtccctgcgctactgcatgcatatacttggaaatgcatttcagtctaggaagtgagaaagtgtacctaatgaagtgaataagtggtacaagacacaatgacaacaatcagagaaatagagaaacaaatacaaataacaaataatcaaatcaatatatgaacatacctaggtagaccgcgctaattatagtggacagccctagagctcgtcacaagtgactcagccggtctagatcggggattgcgtgtcgggggtaccctgggagtacccactaagtacctaagaagtactctttggcgtgagttcgccctcgatggctgccaaaagtgacttcttgggtacatggctccaagggttctgtccccaagagtctagacgtgatcgtctcatcctaccgcaacagcacgttttccttctcttctctcttcagttgccagttccccctcccttgtatttatatatccatttccccctcgattctccattaattctttctgtgtcacttttatcttcccatctcagctgcttttgcaactttatagaccttacactccgtatagaaccccctttggtatgtcacttatctatatttgccttatctttctccactcacaggctaaagatagccctgttgcatcccgatgtgtgtcagatgctaacaccttatcaggcatttattttcttcatacgtttctcaatatacatactccggtgtttcttcaatttcctcaaagcatttgtcttcctaattgcaccggctcggcacattccagttgggatcaatacttcgaccacaaatccctcaagtctgtgctcccccaggggcccttgtgctccacacttgctccagtcttgatagagtcttcgtgataagatagtgaggcatttgaaagccttcaccgccatgactcaaacagcccccttccaccgccgctccccttcttctcctcatgtatccaagtccaagtccactcgtccagctttacatcgacgaggaacatccggcgtcaacggcgcaatctccaaattgggctcaggacaaaggggagcgagcaaaccatctacgtcttcggacgataccgactttgacatggccagcttcttgaacttttggtatgtgatcttccccaaagctcttatctttgaatcctgcagggattactttcctcacatgcctgttgccgtcatttgtgttccatacaccggtcttttcttcaatggagacataaagctgacccaattccagcgccatgtgtgagaaccagatcactgtccccaacaacactttgttatattgtagtgaaaggtatgtggtaaatcctctcggcctatatttagagccatcaataccctttccttccctcccccaattctcttacctcttcgtttgggacctgcatcatatcttgacacttgaatacttaccatttcctttcacctatatagttgccgccgcaaagactcctgcaaaccactctcagcatcactaccatccatgtcctcaatgtcttccactacaccacccacatcaccccctctctccccacgcaccattgtggccccaatgactccaaccagggtgccaagccacccaatccctgccatgcggatacccagccacgtgcatgatgccaagtcagatcttgaccccaccgaatggaagcccgtattagcccgcagcggctcatccctggcctcctccgacgcatggaactatctctcccagttccaccgtggcagcgagcccatgctcccccgacccgtccaacgcagcagctccagcctccccgccctggcacacagccacagtcacgtgcccagtctgacgaacaccccgtccaccgtggcttcgtccttcagcagcaccgcctccgactacctgggcatgtacgaggctcagcgcccgctgcccccgcgccacaacccgtacttttccggtacgagcgtgaacaagggcgtcgagctggttgtcccgcatatcgcttctgcgagtgaggatctcggtcctattgtctcggacagtggctcgatcttccctgctagcagtgctgtgtgggaagatagctcgtgcgagaaacgctctgctcctatctgcatggcgcggggtattggcggccggcccgctgagacttgcgtgaagaactgaattggacaaaagaataaatgggactggttgctgtctcatgagacgagatgaagctatctttgctcctgtttttctttttcctttttgtttcctttcggtttatttatgcccactatggttatattctcttcttctttgaattttcgggtccgagcgagatgtggctcttcagcgtgaaaatgatatgatctgacggatttgctctctattttattatctattctatataccacgagcgaatatagatttattaatgcgtacaatcgcaattggtgccaaaatattatctttcatggtttaaattctgttcctccatcctgaggctagcgagtaatcggaagacagctctgaggaaatgggccgtataatgattatcattcaacaactgacagttatccttgctgagcggatattttcagttgcatagcaatgtgagcctcacattccgcttccggttcaagaggactcaggcctcccgacgacatcttaggatgataccatgatcaatactcagagggtggctcagcttggtcgatcgacgtggggaggaccctccgaagatggtacctgtcgatctatgaaggcgaaaaaagtgggccttccaggactaaacaagtaggattgatgcggagagggatagttgggattgatggtgttggatgccctcaccattgccttagtctgcatttcttagccggcttatactaggcactataatataaggatacatagctgcatatatggccttgttatgtccgtttaggtagtcattcatagttattcttatactacccatcgctctaaaaccgagctcctggggtttaataaaccaagcaatgttacgctggtcccgttattcaggcttattacaaaccacgcttattgaaaagcctagtatgtagatagttaggttcaggtcagccaattagggctatttgtcgatgtcaagtcgccgacgaaactttctccctcggtctactcagttaatggataaataagcataacaaaaataaatagacatctcctaagaaacgtggacaatactaaaatattgaccatgaacacccagcaaagaggcataggtcagaatcgaaacaggagaatagacgccctgcaactttccagattcatatcatttgtcctataaaataaagacaccaaaaccaaccaataaatccaacatatacaccttaaccctagaagtcagaagtaatgcagcacatatagcaccccttcttcggcttatagatggccatggcctaataaaagcattagcaagtcccatatatccatagatatcatacaacgaagaaatatctccatatcgtacccaggaaacaaaaacaaaggaaaaagaaaactcacataaggcttcgcacacctcgcatcactctcattcgcaaagcacttccccatacagaagctattcccttcatccttaccatgattctggtccgggaagaggggaggaggcgcaacctgtgaaccaggtctcatcgggtcgatgggagccatgccacccgatgcaccggccgggatatcgtggtcgtctgggccaaagccctgggaccggccttgggatgacgggcttgggtggttgtacgcgtacccaggggccggggccttggcatgggatggagcggcaggtgcctgggaagctcgcacgatgaatgtgctgtggatcgtaggagttgccgatgaagctggggctcggattggggtgtgagggctcgggacggtgttttgatggtcgtcgtagccgacctcgtagttgccgtagttgccatttccgttgtggttctgggcctggttctgggcctggttttggtttggaccttcgttgatgtttttgaggtattccagttccgcggggcctgggccgaattggtggtgggcgtattgcgccgaagcgagagagacgctgaggaggagggcggaaaagtgcatgcttaaattgttcttttggtttttctttgctgatgcttttgtctttatttttcttcttgtgtttatgtatacggcgactggtcgttgttggttgtcgtcggttgtcggttgtcggttgtcgagattgtcggaggtcaaggtacgatgaacgtatgggatcagggctggttattatgtagtagagtatttcacgcgtatattaggaatggaggggtgtgttggtttcgcgcgttggtgacatttttggatgcctgtggaatgtgggtattcgtatacaacggcatacaacatagacaacgtaactctttcataacatggtataaattagttaaggtgaggttctcgacttgaacaataaacccgtcctttctagctggtagtcgagtgctaactagtctttcatctgattccgacctggcgaggtatgagcttggctcatgatgtctgtatagcgacattcgcgaagtaaacaggacaactggggttccgatctgccttgattagtcacgcgggtgaaggttgatacaatatacctataagtgttgaaatatagactcactgcctcgatgtatcgaagtgatataagaccacacagtttagaatttagaaggttattgctgtccatggaacagcaaaccttcgggatgttaatccaaccaatcccaagccctggagacagctgtcatgttcacgtaagggcatttacgtaaggcttcccagttgcttgcagggtcaggacaggctttggcgagtcaggctggaaaggtaactcatggctattacaagccactgaatccgtagttagcttatgtagtttttcagttggatcacgtaactagtgcattgtgaacaataggtctgctagtcggccctgggaaatgcacatccctatgatccacccgtggatcatctgggtaacaaatcgtctacagaagaaagtaccgaaagtaccgtacatgcacagcgacagttagaccaactctgctcggcagtttgccacttgagtcaacgagtggctggactaagaacattcgagccaccaacacatggatccccatcaaggattgaccaccgtaaaggtacggttcttgggaacgtcccacttcatatagcagtaacaggtcgccacgtcaggagcaatatcaggaacaataccaagagctttttccatattctgttagctggttttgccactgcatcctggtcgatagtgaggactggacctttaagaagatccgtcccggcccgatcacgtatcttctctcaaggcttcgcatccacgagaactgccaacgaatgctaacatcttcacatattagcggagcacagtccggatttaaaatttccagactccggggtactctgtagaacgcaagtctgacgctcattgcgtatttcgatgttggggcagtgggagcccccaataacctcgccaggaactattttcccttattattggcggatccaattggacgggttgggggatagggctttcccttgtctttcttccttcccctttggacaggaaactgcaggctatgaccttccttatgatagccgagtgtgtcctgctagggagaaatgacaactgaaaaggcttgaggtgatgaggttgccccagggagtctggcatcacttgatgccagggtccttccaaacttaggccgaaggggtcgagcgtagtcgatctcggcttcaaggtgggtagacctctcgcctgcttctcattaaatctcatgttcaccctgccatgacccatcgccatcaccgacaaagaagcctcacgttgacaggaaacaacctcaggaagaaactgctccagccatgccttctgccgacaaatggggccgcttccttgggccaaggttaccgaccgtgatgtgtaatgactgactcggacagatcgatgtcccccacaagctacagcggatgatgacagcgttgcttgtaaacacgatgagacgttttcgccgtataaaagccaacgtcgatgcccgtcacgacccccgccgacagtccgacaacgcgaaagcaatcatcgacatggcctggatgaaacggcctcgaagcaccgatcgatgctccccgtgttgtgcctgcctcagatgatcatggtgttctacgaccatgaaaccttgtttcgagttgacagccgaccgacgtattattgcctttagagacttgtccacggtttgcaagatcaacagacatcatgccccctggcctgaaccgacttaaaaccgacgtacactgcatcactgatgccaaagagacgacccacgacaacgtccacaggaatagtttggcccatgggcccatactgtcatacctgtcacttaccttcgtggatagagtcctatcggaattttgaccgaagtctctttcatgaccacaccactccatcgacagaggcgacctggtttatatggcaatgttgcaggggacggaacctactagctggatcgctcgctcattcatcccaactgacttggcgtggtgcactggtgcggtacagcaatgaaccccatcatcagcccacatgcgaaggaccccgtcagcggtgaaatgcggacggtcatcactgtacacgtttgcggaccagccggacaccggtgtgagaacccgggcgaagcaatgtgtgcccctctacctccagcccgcctagtacgccaggtccacacgaatcgcgagaagtagtctcaaccgaacccagagcgtccgattcatccatatgtcctttgatccccgtctagcgtgttcgacgaagcgaaggcaaggccgggaaacgccgcctaggcatctttcgttcccttcgccgtccccgttctcgttccacaacagctttgtcaagaaacccatatggcccggaaataccacaaataccctggaggtgatgacggaaacagttgaaatagtccatcggaattaagacacggtattctgccgcaccgatggttcgttccgtatggtcaatgaccgaaaaatgctggtataaaggatagatgccacactactcgcatagaagcacatgggagccagtggttgggttgggttggtctatcatacccgaaccaacactagacactgcatcaaatgctgattccgtggcacacccccgagttgtgatattcggcccagtaccgagacactgccaggctgggtaatacgatggagcgatggtgaatcatccctcacgtccagctttgtccatgacccccataaccagacagttgctacaccacactggcacagaagcacataggagccagtgattgggttgggtcactcaaaccaacaccggacactgtatcaaatgccggttccatgtcacactcccgagttatgatgtttggcttagtacccagacactgcaagactgggtaatatgatggagtgttggtgaatcagtcctcccttccaaccgcgtccattactcccatagctggacagccaggtcattatagcccttgtatcccctgttctgctttgaacgtccagcaatcgatgcctgggcagtctcacaagatattcaaggcgtgatgctcaagtgttgaaggcttcgtgggtcgcggaccgggaatgaaatcttcgggatcaggaagtcgattctggtgagaagagccgacggtgctcaactcaataggtgcggtcgaggatacggcaatgtatacagtggggggggggtgtggaggatttgtgaaaagacaaggaggggggaacaggttgaattcagtccggacgttggaggaacgggtagggcgctaacaaactgtaaacgaaaagagcgagtcagcacgcagtttcaaagctgcccaggtgaatcccggacaactttggaagacagagggaacagtcacatatctcttcaacgtgacattgctttccttcgcgtgagagaaaacagaacccggtcccagggatgaggtgtccaagagaaccattcgggttgccgacgacaacgtatccgcagattgtccaccaagtattcacagcttcgtcttcgaggtatagtgagagttccggcgtctggacaagtcatcgagattgacggtcgaattcgatgttcaactgaagacacttgtggtcagtttacttgcagtcagttcgagtccacccgagagccctagccatcccaattggctccaggctctttgaaacagtggaacataagtgtgcaaagcattgccactacatcaactctccaacaatctactgtgggcagaagtccaaaagtcgccacgactgcaagaaggactgctttgcctctttggtatctccaatctatccgaaggcagatctcggccatacaaatgcgaataccaacacagggacttcaaattcgcctcattttccagcaaaccacaggccaggaccaaagctggaaactgaaaagccaggcgaaaataataataatggaaaagcaagagcttaggttggtccaaatacgaacgttctctctatggagggaaacacgacgattggctggcaattttatccgggaccgattcaaaggtcttaaaaacaatgaaacaacaatccaattctttttggtttttctttttacattctgatattctgatattctgaaatcctcaagcctgaagtgaaggttatcccaaatgcctcgaaagctcgagaactctacggaagtataggaactgatgtccaattcggcttggacgatacggactggcggcaaactgcccaatcccctcaaatacctcgtttctgatctcccgcctttctctctttgactctcgagtctcgtcgaatcccatctcccaacctctacgaattctatgtataaggctatcttcttcccagtcgggtcacacttgtctataaaccggtatggccgaccgctctatgtcccaacccctagttaccttgtcaatattcatacttcgccctcttaaacgttttgccccattcttccatcataaatctatccatttcctcctccggaatgccagtagtctggttactaacccctacgaagtcgtggtattctatagctagacacaggcagataccagggaatccccatctgaccagcgtcgagcacgatagcccagaccatcccgaagcatctccccacataagagcagaacccctgacagcacacctggtccagtccaaagatgccagatctctccgcagcttgctccataaccgaccatggaggccctgcagaccgcaacggggtccgccagaccaactcggtacgcaacgagaatgcaacaaggtgagtagtcacctttcccgatccaaccccaaattgcaaaagaccttacctccattctctcttacctctctcactgtctcactcgcacatctttctcatccccgtgaaccaaaccctttccggcaacgcttaaatgatcgaaagctgagatcccgtgacctccccaccagcctgaacatcggacacaccagcgactcacctgagcgccgccagcagatccgcgagcaggaactcgacctgaactactatcgggagttcctggatgaattgttcgccgtcatgcgcgatgctcatagcgattccgtcgctcggctcgtctcgctcattcgcgccggggcgtcgaacggggagatccatgccgcccttcaacgcgcccagaatgggagctgaactcgcacttttttggtattcgacctttgcatcgagaaactgcgctatggtttgtagcttcggctttcgtttgccttcttgtttcttgcagtgtgaaaccaagccctgcagataaccttgcaaggttggaatcgagggctgttgccataactgtgcacgctccatgcgtattgatgtcttctaggaaaaacaatcatgataatgcccttcatcttctttcttttttggcctaggtcttggaaaagaatataagacaaaataaatgctgccagtcgagtggtagtgatatagctcgtgacgctccattttatgtttttctctttgtttcacataacaatgttctttcctggggtagtttgtgatacgagctttgcatgtctgatgtgttgtgttttgtcgcaagtattgttgggatatgcatgaattagggttgttgaaaaggaaaaggaaaaaatgacgtgtgtctgactcaaaaactaagtaagaacagggaaatgagttccaatgacaggtgctgctgggctaacagctgtggtctcattggggaacatctacctgccttcagatgccctggatgtcgaaaatacctataccaaacccggtatgagaagtaatatggctgacacttagtgacagctgcctgccactaacccaaagtgtgcggagcccgatgcaaacccatcgaccggtacacgggaaagatcatgtatcatccccagccatgggacaaatgaaaggaagaacattgaaacgggagagaaatgatgcgagcatcaagatcgacttaaccaacatgatggggacgtgccctgattggactgtaccgaatgtgagctgcgtctgtctccattgggggcgagagttatggttgctaaaacgtgggaggaaaacgggagaataagtacgtcgatgcgcgcgtctatacgatgtacccggtccagacagacacagttccattctctgttcccggagacttgtcagaatatccgctgctagaacacacagggctgggtgtttcttgaaggggccgagtggaatggggaatccctgtgggctcacggattctatctccgagcggttcgagcaatggaagcacacggttagtggatcacccttgcgcttctctttccctgtccatggagatgttctcctcttctctctcacgatgctagagatacctcaagctcttgctggtatgttttgaaaagagactgtactaacccatgtccgagatcgatgagatccatcctcgcactgtccgcctctgctcctgtagacggagagagacggggaacactcttcctctctctccgcctccaaaacaagaaccccaacttttctttcggaagaaagtccgtactaacccatctcccattgttggccatgggagatgatgagatgttgagaggaggtgaaccagggacaggatttcccgacccgggacggttacaggacacctgggcacaccgattcgaccccccgtgaccatgaccagacttcgtccaagtcgatctcgattccggtctttttctatacacaaatgacaaatccaatctctatcctcggtcacagccatgtcgtagctcgcccgttccctgctcatcgcgacccggatccgcagcaggtcagcatcagcagcatcaccagaccaaacgatccgatcccgttgacggctttggttgctgtagctggaaaccaatgctgacgataaaaacaacgctaacaataactacaatgccaacgataaaaacgacgcccacaagaactacaatgccaacaacaatgctaacgctaatgccaaggagaacgacaacgcaccagaacgaaaacactaaccggaacgacaacactaaccagaagacaaaatgagaacgacaactaaaacgccgacgacaatgctcacgccaacaacaacaccaacgaggacgagaacgcgaaccgaacgacaacgagacgagaacgttaacgagaaagctaacgagaactacgatgagaacaccaacgaggacaccaacgaggacaccaacgaggacaccaacgaggacaccaacgacgccaacgccaaaagccaactaactccaaaaccgaacaacctcaaattcaaccaaaccaaacccaccttctcttcgccggtcagggggcaatggagacgcagacgcacgacagatcgtgtcacgctccgcgtgagtagccatgtttggaacctacctaaaatcccatacagacgggactcggtttgaggctgtgctcatgcacgcttccgtttttggttggtttcgtaatcccaggtgccagggtctcgggctaggtttcaacggcagcggcagcggcaacggttgtgggatttgagatttgacatctgaattcgaaatctcgggtttgagaactacattttgggagatcctatatgtggaagactgcttgtgggtgggactgtgcatattgttcggaggagagccttggtgttgtttggggctgtagtgtgtgtagtgtgtgcagtgcgtgtagtgtgtgcgtagagtcagctggcatcggttggcaacagtttaaaggatcttgcaggtacggcaggcctaagtcgatgtccgtgttatcgaaatgacaagccatatctacagaggtactcggtacccggtgtacgtgacatagaaacagaatggttttaattgatctttgaaggaaatctcattcgtccattgtagcatccatgccacattcccgtacctatcatgatcatgcatataactttttaacatatctaaggagtgcaacggccagtgaaccgggggtacaatgagcagtcacggacggtataacgagcgcacagccaggccaggaaacgctcgagaccgagaccgtagccaccatgaggggaggtaccatacctattgttcaaacgttagtatggataagaacattaattaggaacaatgcgagatatcgacacttacttgcgctggtcagtgtaccagtagtagggcgaggggtccatgccctcgtgcttgtaggcggccatcagctcatcccagtcgtccattctcatactgcctccgacgatctcgccaacaccgggcatgagcacgtcgacactctcagtgacacggcggtcctcgggagccttcttcatgtagaaggccttgatgttggcggggaagtgggtcaggaagataggctggttgatgatatcggtcatgcgacgttcagcagcctcagcaatatcgtcaccgaacttgtggggctggccctcctcgttggggatttcgtgctcaatcagccactggatagcatcgtcgtacttcatgcgacggaagggacgggacgggggcttgaaatccgggttgagctgcttgatatatccagcgatctcgggctcagccagagtgtagtcaatcacgcggcagatcacatcctcgaggtggtcaagcaggtcagtgaaggtgatgaagtccaactcggcttcgatgtgcgtgtactccgacaggtggcggcgggtcaacgacttctcggcacggaaagacgggcacacacagtacacatcacccagggaggggagacatgtctccaggtacagctgggaggactgggtcaggtaggcgttctcgccgtagtagtcgaatccgaacagagtgctgccaccctcgacctgggtctgcaccatggcgggaggggtcacctctagcatgcgggtctcctcgaatgccttgcggaaagcccgcagagtagcggcgcgcaccttcatgacggaggaggaggtctcaccgcgcagcaccaagtggcggttgtcgtagagagtctgcgggtcggcgtccggcgccacacgcgtggtaatagcctccttgtcgccagcggccttgccgatgatctcgaagaagtcggcgtgcagctcgcggtcgttgggcgcatgctgcttggggggcacggcgcgcatctcaccgtggatggacatggaggtttcgagggtgagggtcatgatatcgtaggtcttgaccatgtcaccggtcaggacgcactgcaggtacccatagccgtcggtgagagtgatgaagacgacatccttctgggcgcgggcacggtgaactcggcccagaacgcggactcgggtgccggcctcatcggactcgggggtgcgcagcttgacgatggccgggtcggtgacgtccagacgaacgcgcacgggcttgggcagcgaggtgtcctccttgatcacgaccttcttggcctcctccaggaccttctggcgcttgtcggcctcggccttctcgcggatggccaattcgtgttccttggcggccttcttcttgcgctgctcccaaaggttgttggccttcttcattgccgacttggtggcgggcttccactccaatttggcagcggggtcgacatcctccccggcggcgtcggtctgggacttgcgagtgaggtactggatgccttcagtggtgggggggtgttccacgtaggcgtggatgagagtcttgtagggggcggtctcggtaccgttggcgggggactcgtctctaccgacgtcttcgtcgatgtagatggtggtagacgccatgacgttcagtctagtccttgcagctcgagttgcggcgggagagttctgtgggagaaataattaatattgggtctgatctgtgagtcatacacggtaaggctgagaagaatccaggcaggacagattagaatgcaagggtagactcacctgatacacagagaatggaactcttatctcttcccaattgcaagttgtccaagggaagaatcgcacattatggtagaggggtaaatttccgatagatgcgggattccccacggatgcctgaggcagtcatcaaattgtatatctctcggatatcgttcggagtatatatttgggggttatgatccaaggctgattgatatgttcacagatattagatgatacatgtggagcaatcaattatttgaatccatttgtctacatagttctatctctcaccactaagatggacagtatatctgtgcttagagtatatcaagggatatacctgactaccattctgaagcagatgaacattttaaactcatccacgaggtgagtcagaaccttacctacatattccaggtgtaggctttcgcttactagtcctatacctaggtacctaggtagctgacatgttcgggatattgcagtttcattgtcatggatgtatcaaggaggtcacgggactagatgatttccccggagagcggagattaaaagaagaggatttagaagaccctaggtagtactgtatgttgtagtactgtagtactgtagtgctacagtactccaaattatattaatctcatgaacctgtcaggggcatgatccaatcctgtaggagccacgggaactcgaagtttggggaaacccaggattatattgtattctttgttctttatagtaggtatgtaggtattctttatatccttcatgttcttcattagttattttatctttatcatctaatatacccaatcgaggactgcatataacttcctataaatcaataatctcatatataaaaccgaagttagtccccctttaacccactcaagtgctcctattatcttctcccccttttattttattttattttattttttattttttccctttttccctccataccttacctggattcacttccttacctttcattccttttcttcacgctcttttttacacccttttgtttctgtttctgtttctgtttcttgttttatcgcttcttaattttaaggattatttttctaatttttttctaattttttttattaaaaaaaactggtgtcaactgtaaactcttccccaatctcccccagtcttaccccctttttttccccttcaggtctttttttcccttttttcccttttggttttcctaacctcttttaagctaatgacttttgtagtcttttgacctgaattcctctcttcctctctcaggagacttgatatacttgttctgcatgggggattgacatatatataagtggcattctctaaaaaagacccaaaaaaggacaggtttgtctccatcccccattccccaatttcaccctgattgaaacattccaattgactgttgaactttcatttagacacgtctacatttgaaagagcttcttctttttcttgataatattctttttcttctccacccgaaatcctcctatttttccctgcgagattggctgtggagacatctcctgaatggtgatctgataatcctccctttatttttttttgtaccctttcttcccctcagagcctctcagtctggtagtcagggcctctcatccccgactaagactaggttcttgtcttaggacaagtgttggatttattctcgccatgcaagcctcggatgtatcgagcatcccgaataattcgcgtctaatccctcccgggtctaaatacgcgctgaacggtgatactggcttttcccacggagcttacaacaacaaccaccccaaccctatccaaggattctcggatcggaatactcgtcgcgccaatatccccgctataaacactgccgccggccaacactccgatatggcatccggcttcgatatgaactacaccccccttctcccctcccagctgctagtaggcagtcccttccaaccaggaactccctcggctttcgcttcaccccagtttgccaatttcggtggcttcccacaggccaatggcaacggacacgcccaaaacaaccagaaccatatccagagcccaacgcaaggaatgcagaaccatggtttgtatggaatgatgtcacctgatggcatgggtggttcccaaatgatgggccctcaatcgccgatcaatggtcttgggggtatgggcaatgcggctctgggaagcccccaatcttccgtggccccgggcatgctgtcagggaccagccgtaccgtgtatcttggaaacatcccggctgaaacatctaccgaggagattttaaaccatgtgcgtagcggccaaattgagtcggtgcgtctgctccctgataagaactgcgccttcatctcctttttggatagcagctctgccactcatttccattccgatgccatcttgaagaaattggccatcaaggggaatgatatcaagatcggctggggtaagccctcacaggtacctacctcagtcgccctggctgttcaacagtcgggtgcatcgcgtaacgtttaccttggaaatctgcccgaggagacatccgaggatgacctgcgggaggatctgggcaaatttgggcccattgatactgtcaagattgttaaggagaaggcgattggattcgtccatttcctgtcgatcagtaatgctatgaaggcggtcactcagctcccccaggagcagcaatggcaagcaccaaagcgggtgttctacggcaaggaccgttgtgcttatgtgtccaagactcagcagcaaaatgctgcgcagttccttggaatcgcacctggatatgcgcacgtgctgaacacggcggaccgtgatctgatttctaatgcgcttgcgcagcagtctgttgccgcggccgccgtcgcaaccacagcgggcggcgttaacaatctcggcaaccgcaccatttaccttggaaacatccaccccgaaactactattgaggaaatctgcaatgtcgtccgcggaggcttgctgcaccatgttcgatatatccccgataagcacatttgcttcgttacattcatcgaccccacctcggccgcctccttctacgccctgagcaatctgcaggggctgatgatccacaaccgacgtctgaagattggatggggcaaacactccggccctctcccgcccgccattgcgttagcagtcagcggcggtgcatcacgcaatgtctatattggtaacttggacgaggcctggacagaagaacgccttcgccaggacttctcggagtacggtgagatcgagttggtgaacacactgcgcgagaagagctgcgcttttgtcaacttcacgaacattgccaatgccatcaaggctattgaggggatgcgcaatcgggaggactataggcgattcaagatcaactttggcaaggaccgctgcggaaacccaccacgtcaagccggaaacacccagaacggacagcagaaccgcaacggagccggcatggaaggccagtcaccaccatccgttctcaacggattcccgcagaaccttagccagtctggctcccagtccagcccgactcgccccgccctttcccccgcatcagggtccaccggctcccaaaatggacagcaccgtcacccgctgcagaatgtgtcctcttcctctggggctctgaatgtcggctcgagcaatccgctgacaatgtacctgaaccagatatctgctcatcaggcacaggatcaggaaaaccatctcagcgaccctatggcgctctctagcctgcagacacagtcccagccacagcagtccctgtacaacggcgttagcaacggtgacatgtcaaatggacacatggacccgcctatgcaccagcataagtcctccaacagctacctgagtgtggcaaacggaccgggacacggtcaccacgcaagcaccagcagccttagcgtgccccgtgcttcgcactcccgggctgtcagcttgccttcattctcccaggagcccttcggacctgtctctggtcaacccggccactctcgcgcaggtgcggcccatcagcctcagagcagcttctccagcttctctgccctcggtggactgaaccactcaggatttggcctggctatccaaaacgaaaactcgctgcctggttgggctgaagaggagattggagccaaataattatctgcacgtgctccgaaggatgccaccttggtctcattgtccttggtgaacctaatgccacattattctctgttcttacatatagtcccttcttgattgtcatgtctttcctccccccattttgatctggttcgtttcttgtattggtcataatctcttcttttttccctcactttggactcatttgccattcactttccacccttgtcttttctttactttttggctttttttggatttccccctttcttcgtccggacatattccgttcgcaatggttttctatcccccctattaatccttttcatgccatcttcccttctttactaccttgtattgctagctggccttgagtctcttctttttgtctttgattttttctatcattttattttgttttggggctgtgagtacgccgcatgtttcactggatgatgaccatggagagggacgagtcgtggcggcgattattgcattgcatagcgaccactttggactttggtcctattggctttttaattgctagcagaaaaatggccatctacccaccgaacttgaaacattagttagaaatgtaaatgatcatctataatagaaatctgcagattttgggaatcaggagaatgcataaatgcaccaagcgacatgttatatggaaaattcgttttataggctactttcactgcgtggttctatatatagtctatggctagttattatagagataacaattcgagtactcttagtctcaattcatctttcattttgttctcatgcgcctgttgacatctacaacattcagatcacgtgactgttgaaaccaaatcggggaaagatcggacacatcaaattggatgcttcaagccgcctcacccattcatctcctccacaaccccaaaacaagctgtcgcaaatctgcgccaacttttcaccatggcgcttccaccagagcaaattaacatcaagcgtcggcgcgaggaagaacccgtcgagactctgtgtacgagaaccgtccccttgtctttttgccccgcgatctagacccctttaaaaagatacataataccatgaaaatggttgcctagagatgaaaactcgatcgacacattgacagcagacactaatctggccttcagtcattcaatccgcactccgccaaaccaagcggcgcttcaccgacttcgtcttccacagagtcactctgaaagccagcgagatcgggagtgcagatgcatcaccaagcccaccagcaacgccagctgtgcagcgggtcgtacgcagcccacgctcagtaagcagtcttcatgtaaaccggcgcgccccagcatcatcgatgggcgtgcccagggtgcgggctacctcgccgggagcagaattccgcgaagcgcagcgcattacagctgcacgcaaagaggctgaagaaaagcacaaacgtgctgtctacggtggcccttctcctttcactgacctgcagcccggctcttcggctagctctgatgtctccaagcaacccgcagtgcgcgacagcagcccggcatcagtggagtcatcctccagccgcgcccaggctctgcgccgcttccagatctcgcgctcaaatctcaattccccaaagagttcccctggtggaatccagaagcgacgcgccggtggtcctgcgcctggtgtggctgtgctggtcgagcagatgcagcgaaatgcgcactcgcggaaggcatccatggtctcggatctggtagctgaggcacaggctctctcattgaagcctaaggaacttgtccaggacagcacgcccccgtcacctgttaaaccacgcaaacggcctgtcgttaaccaggccgagaaacggtggcgcgaggagcgcaagggtgctatctcggctgcgaagcaacatctgtctgatacattggagaaatccgctcaggtacaacacaggagctgggatcaggaatctgaacgcctggttcatgatctcgagcaggtcgcgctggaactcgagcgagagggtgaccaataccacggcatggacatcgatgtccaagtcgctgggaaaccggctcctcctccgcctgcatctttacagcatgctttcagcgcagctcctaagccgccgttgaaacaccagcctcggcagcccaagggaccgagagtcgcgcctacagcaccgcagtcttcagagcagattgaacaggctgtggaggaggatgacgaagacgactatgtctacgacgtctacgtccggcgtccgctatcagatgctgagatgctgaagaatcccctcgccgagtttgagtccgaccagcagcaaaagagtattgccaaccctcaaccaggagtaggcatcattgtcatcacggccgaagatgaggagtattgggaggattttgttgaagatgatgaggaggagtgggatagtgaggatgctgactctaatggtatgtgatgctttgccttcgcttgccctcttcatccccaaaccatagactttcgctgaccttctttaccacagccgaaaacaacccagccaacgattacccagatgaggaagcgtcgtccgatgatgacgactttgactttgatgattcggcgagcgaggatggcgggactgggtacatgtctcgctaccgcgggcatgtagactcggatgaagactactgattctgatttggttgtttatggctagccgctatgcgccaccgccctttcgccgcctttctctttgttattttcttcacggctccgttgaccgggcgtttactttgattaccctggatacctcactcttcatatcttcatgaaaccaacctgagctttgtcttgtcacattacttgccgaagctaactgaaatggggaaatggtacatcaaatatgaatacaggcaaacgagcgctgtatcgattcttgacagtataaaacccctagattaggcatgtcgtatacctatagcctataccagatgccttctaaaccatcaacttaccatactactgactacatccatgtatctgggataaagaattatccctgagagagacaaccaagctgaaagaaaccccctccccccaccatcctgcagcgaaaccgaaacctgaaacaaaactaccacaacctatactactatattataccacccttctatccgagaatccccagacgtgtggggacgcatacatccaggataggccatttacaaccagtaacaatcatcaaaaacaacagccaacggcgtcacaaaccctcatccccatttaccaagtccataccaacccccgtacctcgtttcacctgtgcccaccctcccaagaccgaaaaagcatatccgcaggtaacactgccatactctcggaccagtgtagtcggaagaactccgtgcaaggaaggtgatcaggcaatcgaagtttaaaagcacaagggggggggagtgtgtgggctaacgttcaattctccgatccagcccggatgaaccaaccagaggggacgggttgtgttgggggcggctttcgcttgtttaatatcgagataggaaggagttaattatcgtgccacgtggtttggctttttgcgatgcagtcatactgagatgtgacgagatttagggatggtccggggcttaggcgtaatgcggggtagatatgcagatgaagtcattttgattttgggggttgtacgggcgggtaggggaggcaatgctgttggtgttgggctttggatgagatcaagaacatattgattgctttttgttgtgttggtgatgatgatgatattgttgggtcaggtgttcagatatacatgttggtgttgtcgatcttgtatctaggcgctacttgatagctgtctattggatggagatatatatttcctgtagttcattccgtcagtgattggtttatagcgagttatggtgatctatattgtatacatgtaatgtacattttactacagaccggtgtttggtatagtccagaagccgagctgttattcgctgtacgaattaggctgcctgcatgtcccgaaacggtaaactctgcatgtcgcaggagatctatcctatagcggtcactagtgtagcgctataagctagtcgccaacccaacatgtacggcgaacagcctctatttgacatgaaatagacttcaataaatacattacacgttacaattgcacgtgcgttccaacggcgctgaatgaatgcatggtagcctttcaacgacgcaaggctggatatcactctactccatacatgtggactcaatcaaaatattcaaggcgaggctactccggtactccgtatggagtaccccactactgctgcagaaatagccccatgtctaccgggaaaagcggcctaacacatgcaaagtcctcgaagatcacaaaagataggatttggcatggagggcagatcccgtgcacgatgccagatatctcgtaatcttcacgcttttaccttccacatttgcctttttaccttttagctttagaagaatggaagatcaactgaagaatacttacacctccatgttctccgttcggctaccccgaagtgtttcgggtggaaatgggactatattatagctcagtttggttccatggttgattttcccttgcaatctaatactcgatgctggttggttggatgtaacaagcgagtgtgtgtgtgaagaggtgaggctctgcaaaaggaaattaaaaatattaaaaaaccgacacgctagaggtaatttaggtaatttactaatccactgaaataattacagtaaagcaaacttaccaaacataaatacaaagcacggatgattttaacccgatccttcagccccttggctgattcattgagagatgtacatcctgttctccgtctgcacgtctccaaacacgaaacaaccgtgcaacgttctgactcgcaaaagtatccatgaacaaggccgacgtcacctccgaaatgagtccgctctgagcctgtgctcctgcaatggtccaatgggagcattaactatcaaggctgttgccaaacagagtcaagatatgcgacttgtcgtcgggttcatgtgctcgagagtctcttgagtatccgctattagttgggctcgaatatctcgcagcagtcggaggaacgtcggaagcaattcgtcattgactaggatacactatcaatttggcgtcttcgaagtcgttgaagacccaaacccgctgaatacctgaagatcaatgccaagtctgctatacgatagtgcccgattatactttacgggtgctaataataatatctgaagataaaacgacctgccaaggttggtgatggagtcgaatggaaatgtactttggactttgattatacttcaaagcacgggattattgactctgatccagaattcggagaaattcaaaagccgtgaagaccatcgaaaattaactacctactaaactaggtatagtccttgcagtgatgtctaccaaacgaaacaacgcaaatacgacctcaagctcaagctcagacgaatactaccaaaaacatagtgcccccaccccctcctttcgatccactcgacgacaaatcccgaagcgacacattccgtccaatacccaacctccttaacaggcttgcgaattccctatcagctgaaacatcaaagtgcagaaatagctcacgccagaaggcccgatcccggagctaacgacccggctctctggcttcggtgtgatgatggcagcattagtgctcttgccttgtcgtcaatgcccggggtctgattggcgtggctgtataggaaatactattcacgtgcgggcattgacctgatcggtcttttcaccgatattttacagaggacgccgagcatttgactgtttactactttaggtatcgtgatctaaaaaggtgtacaaacgtccagacatcaacgcgcgtgcatttgactcatgatcgccgcggtcgctcatgatcataattcaatagaagtgatgctaatgccgttaggagtattgttcgttctgacgaataggagacgattctaactgttggttcttggactttttccttttttttttttttttttttttcctttttttttccctcttgcgtcgaaggattctctatgtcacatctccccatacgctgcatccataccctggtcacccccttgttccctaaccatatcacattcaattcaaccatttgcgatttgcagtgaaaatccctaaatcataggctgcagtacatcgcagatatggcaacatcccattgttgcactgcatatcgttcgatcggctgcggtgtaacaaagtgctaaattaggccgccagggctgatcggaatccacagtggaaatttaatattctgcaggatccggcatggccatgctgacggccctttgtagtggttgtatgagagtaatcttccagagaaaagagacgataggctcgaagtatcccattcgggtctgacaatgacattgttctccacatatacctgggcgaagttgcatatacgccctatcaagacgggaggggtgtgtttaaccggtagtgagcctatttaatttaaggtcttgacactggcctccgctgaatatgtatatgtatgctcatctgaccgtactgcacagaccagagttgagctggacagatggtgttctctcgagctgaagagtctgcggaacagaacggaagaacaaaataaatcagaaccagcttctacatacgttctacaatatattactgccgtgtaaccgtctaccattaggtctccgagtaaattatcccaccttggaaacctggggggctggagataaacaaccccctatactccgtactccgtacatcatcagattccagaacaagcaggatcaagctaacaacataagccgagaaggaatagaccatccgaaacgagaaataagcacagcctccgtcagttcgtcacgaaacccacgtgtcactagtgcttataatgtactccgtccatctccacaaggatcaggcgacttcttggcttgggggcggacaatggtggctatggcaacagcatctggatgatagccatagttacagggtacagtatacgtcttactccattttgatagcagtaattctagggagggaagtcatcagacaaacgatagcctcgacacagaagcagaagctatacccacttagcctggccgtgaagaagatcggcaagggagaaaaaaacatccaatagtggaccggagattatagtattttcctcgaaggatggaacgaatcatttgatagacattatttcttttggtcatggaattcaatagaggggttctgtggatatcccgcagcggattggtgcgtttcgagcattttgtatattaatattaatatcatgactgatgttatccacgctgaacaatgtataatagctataaggagtgtgagtacggagtactgtcaagctggttgatattgccgtgatatcatccaatatggggatccatagctctgccatcattatccggatgcgtactagcgcaagtcgcgattcgatcagcagtaattaacgtaatggaaatataaaatacagcgatgtctaagacagctttgtatacctaggtaataatgagctagcgtttgtatttttgaaatgtcagccggggaacttcattcgctgcttcgcttatcatttctttgtgatttgcgcgtcgatccattccagaagtgtggcggaatccggagtctagtcgtttttgcaagttctttgaactcaactttcatggtaatttttaacttttcaaaacggaaattggataagtccacgttttctctttgttgcactttttttacttttttttgacaaatactaccgtcttcatgacctgccgaacagttagatctccttcagacaaaggtgacagactccgtacctcgccctagactgcatctgggaaaagaaagctggagacactagtagatactgtatattgagtttgcttggcatgtcttccccccatttttgacattcgtacctggtccaatagtactatgtacaatatagtaactactccgtacagggggtaaaaatgctagtatgatgctagcatgatgttagcatgacggtatatgatatctgtgccgagagaggtattatgtcagactcacaatcaaacttggaaaaaaagaggaagataatcgtgtccaatttcattgcgggtgagctgcactggatcgaaccgtgcaggactggggccgtttatcgtttggagcaaatgctggcgtggggtccaaaaagcggagatatacggatttaagtcctgacaacattgcacatcaaccgtcctgcgtggtcttggtacttggtctaggctacctgcgtctccaagtatccaaaaacggagtccactgcggcactacatgctctctatactacattcagtaaaagcacctacatacggacgtacagcagctactgctcctactaatgtaggcgtcgtggctagtgcgagaaagtctgtgtccttggcaccatgcggctgaaatatacaccgagtctgggaggtcgaaggccagatggcgggatttgacgccccataactagaaaggggactcggagccgaatcggaaagccgagaggagctacggggttgtccacctgggcaggtttgggtcaagttgattattaattatactttctctccagggctttttcccacaaattattttcttgatggcgttgaaggatcgctaaataatagccaagagatagttggagattacccggacccatgatctgatgttgcaacactggcgcccggcttttgcgccttttgcgggcccaacagccaacagccaacgccaaccagagcccaacacctttgcggaattaccggggtctccgggatggtcactcttgcgtgcaggaggtcactgtcaggtgttctcgcgccaatgcaggatgctcaatgcgctttttaattccgttggtagcttgactagttggtactccgtatagttagccaacatgaccagttgacaacgtgctccactaatccaaatcaagcactattctgcggtttccaaacgccctccagtaaaagtactttgtgtcatgccatacggagtacattcttagatgtcttagatctgacagttcggcgcagttcggaggatcgcctccgatcctaggtttacttgcaaactatctgagcctcaaaaggcccttccacggttgaaggaggggatcctgtaaaagtttcaaaccctccacctttattgggtattatttggaatctcctcgggattgtttcttatgataggtattgtaaaccgcccttttttttttccgtcaagagattgcctacggagtaccccgtacttacagacgatttgcagattggcgaagtttctctttggcccgtggtggagaggaaccaatctcttcgttaggcaacggttctctaaaactgtgggttcgcctgttgcgcagtgaatgcgcgtctccggtctagtgcctatccaagacatgttggatcctgatacccctaccatgtagtatccatgcatttgtcggaaatttgcgcaccaaacgagtcatttttttgccctgtcgaccggaccttcccgttccaaatacggagatttcaggaagtcgagagacgaatgagtccagatctgaatggaattctagatcgaggtcggaaaaccccccaactttagttagctttggctttgaaggacaatgctcatatctatactccgcaatagtacggagtacggaggtccatacagagtatgcgtaagcaatcgaggacaacatactccgtaatgttacccagttaattgcgtgctttaaccgtggggcagtcggcggctatcgctaacgtctagcaacaggacatagcgttcttggctcctgacttgggacggctgcagaaaaagggcctggagaacaagaatttggaattcaaccctgcatattctggctcataattaagaagctactataacatataaacaaagaaaaaccaaacaaagaaaaaaaagtacagaaaaaggggagatgagatttcgacacctctcaccgcagagaaaaagaaatgaaatcagacgttaagcgataggaaaaggtgattggatagatacagatgaattttggaccaatctgcccacgttttgaaattaaataaattaaatggaatatcttttctcttttcttttcttttttgtattttgtatttttttcctagctaatggttggccattaaagagtagggcccaatatgcacagcatgactcgcgcaatgtgacgataattaaacttggaaaatcacttttctttttttttttggcaaccatggatgagcacggtgatatgtctattcaggaaggagtcgatcttcgtgtcgcagcgggggtcaagcgcggtgcatattatctgcatctcctctcttagtgtactccgtgtattggattgtcgagatgaaaaagcaatatggaaaagaaaaaatgcaagacactgactactacgtattgtaaactgaaacatacgagaatatataataccactataatctcacgtgattgaaacgggctgcggctacgcgactgacgaacgccaaagagatcctgattggacttaggacttggtggagagcggcagacaaagaaaacagagtggagagggggggaaaggctggctttagccccggggggagccatgttgatccgatctgcacggaattcgggggcttcagggactaggattgcctgtgaggagaggcttgccaaggggggtctcggaaacaacgggccatacagaagtggccgatggtgccctaattaagtatggatttggcgcttgcgcaagttgactgcgccgcagagatacgatcacaacgtctctgccttctttttttatctttttccttccttttttcttttagccctggtccttttcctgtttctggtcatttttgagagagattgcatgggttaatgtctccgagtgatttagaacaggtttctatacctgataccctgggaatactacgtctacctgcatatacctgcctatattgtataaccctttttttaaaaaaaaaaatcaaattgaatggtccaaacggtcaaaccttgaagaaaatccaagaaaaccgttggcggctgcagatgactgacgatcggcctggtcaaggcgtagatcgaggggaaaatggcgcagaggaaaattattatcacgcgagtaacatcacagtaaacgggatccgtaaagtggacatgtatcacttcgatatttcaatgcaagttgactgcgcgggaaatccgctgtggtcggctgctgccgagttgaagttggattctcccccaattccccccgcgtccggtgtttgagacaaaaaaatcaaccatggttcgctatatctcgggtatttgagatctgtaggtatagtggacatagtacggagtacatctataggttatcggcagctccgaaaaaggccctgaagaggatagaggagacctgtgtgccacggtcttcaaggatctctcttacctcataatgcttggagatgtgttggcaatgccaaattgagcttgcattagctcctcgcgctcattcgtcctaacatcccaggaccatggcgtacgccgcaacagatgacttttgcgtctaccaatagacgccgcgcgtttgtgttggttttctcgttttttcccttaatttctgcacttcccttcccacatccatgacctcgaaaaagaaaaagaaaaatcacacctgactgtatctattagtccgttacctatccacttctcacatgaacgggtagcgttggatagcgttggacagcgcaaatgaaacactaaaatagaaaatgcacgcgagttcttcgattcttcatctctttattaattatttagttttgttatattaactcatatgtgtcctcgaggagtctcaagcctatcacctaatcgctcatgcaataacagtgcagatatgtacagaaacaagaaatcaattcccttttgatcttttaggaagtcgttcattcatctgttacatctcgaatcttctcggataactactttgatattctccaaactcgggatttgtcattcataaacttcgccttggcgctaaaatcgcaaaaggctaaaggtaaattgtaattttggttaccgcgtggcccccgtttttttcgtaactgcatatgtacaataccaaaagaaaaaaaagaaaaaaaagaaaaaagaaaaagaaaaaaacgattcgatcggattgtgtcatgaagctacaagccaacaagccaacacgccaacggtatagacaaagccaaactttcccatacaatcgttgtaaggattcgaaaaggttaaggaacggagtagaccgaaactatcgccacatcttcaaaagatatcaaattaattgaaaaattatataaaaaaaaaaacaacagtatggtctctccactacaccgaacacggagcaactgtccggttcaccggtctattaattcctttttttttaataaaattcttttccaatttaattatttcttttttgaatagaaatatgtctctctgggggtgggaccgaacctctagagagaaaaaaggacccctgttagcccaacgagccttgtgtatccgcggtacacagctatacagggggggccaaaaggaacaccagacccaggcagtcggtccagtgcatccaacagcgctttagtctctgactttttatttttcgaatttctgttctttccctcatttaagaccgagtggtgctccagcttttcttcttccttaagagatctataaaccttgcttaccccaaggaacatatcatacttcatcttctgtacttcacatccgtccatgggctctctgatatagacctctctatattccccacttctactatcagacctggtctgagcattctggaaagcttggtcctctataaaatccccaaagccaatttcttatacgtactggcatccaaaatggcaacccacacagaatcatacgccacactcccatcagcacgacaaagcaaaatgaaaatcgacgccttactgaacccaggcgacggagacatctctccacgctcccagcacgcctcaatctcatccaaccgtcacagctaccaccaaccctcaccaagcttccccccaagcccaaactactggtacaaccgcagctaccacaacaccagctcagcattatccaccacagcaacaatccaaggtagcaccaaccatgtaacgggcccgtcccaaatgttctttagctaccggccctccgacaaccgcgccagcacaagcaaaaacaaaatctcgctgtccgccccttcctcgccagacccttaccatccgcgcgagcgctactcaagcgtctcaagctcctcttccactaacggcgaccgtcgccgtcccccgcggccaaagtacgaagaagaggaaatgtacttcatctggtaccaccgcgttgacctgtgtcgggagtggaaggacgtccgcgaggctttcaatcgtcagttccctaatcgccagagacgcggtttccagggtatccagtgcaagttttaccgcttcattaaggagaagaagtgcccgactctgcgggagcagaggcgtctgcgggatggagagttcttgagggagggtgcttctccttcgatgggggatcaagcccatgggccgaagtttggtgttcgggaatatactaatgtttggtatccttggatgaggaaggatggggacgttgcgttgcgatagtgatttctttttcgtttcttttgtttgggaaggtcacttgtctgtcttttcgttttcttttgcgtgggtcggtcttcgtctttattaagatacctcttttcagcgtgggaggtctgttgtcttttggatgttctctccttacccccccaaatcttccacccgggatcctgtcttttcgctctacaccttctcttcctacttccaagcttgtttcttggtctataatatctacaatatgtcgtatggagcaatccataccgtgagagtcgaaccccattcggatttagatctagatattacattaaagagtcgatgtcgaatttcgattaacatcatttctttccacctttatcccgtatgacgaatcacacataaatctctgcatgtccgttaccctctctgcatctttgttgaacacacaaaattccccttgcttttgtccttcctggcctacattccaaatcccgacgcacatggtcattcctcaccctatatattcggcacggaggttccggcctcatccaacccagtccaggaaggatagccggcaacccgttagatcctgacccgtttcgggcatacaggcatatgtcccgtacatgtatatgcagcactgccaatccacaaccattgtgttcccacatggatacctacaacataggtacgtagatgaaagaccattactcagcatagccggccagaccgtgctaaggaacgaacttatccactgcccggtcaatccctcagatccgtcgatcatgggtcttaactttcacgccaagatgaacgctatatctcgtatttctgtcgacttcgtataagatctcgatctaggagctatcgagtgaactatctagtgcggttttgacatttccgcggcttcgtcaggggctttcttattgttcttcgcgacctccccttgtcccccctttcctctcatctatctgtctccattgttcgagatcgctatgcaagagtagacaaccaaagtacctgcatgtattaatgcacaagaatctccccaaggcaggacaatgggtatgttaggggcttaggctgaggatcgcattgttggctctggtacttatgtaccgtgcgtacaatatagcttcggtgatctgtcttttacatatggtaattgctatttaatagatagacggatgcgtctaggcaaaccgtagctacaacataaaatatatatcgtatacgacgcacatatgtatacgcaatagttaatcctatatgacgagttgacatggaggaattgacatgccgtgcttcgtcattcgctttctttgcttttgtttggattgtttcctttttgatcttatctattgtcaacacgagatcggtgagggtagaagtacgaacaaaatagagatcgtcgaaaataaaaagaaaacatgcaaatggagcctgccaaatcctagcgtgtcggggttcgggacttcatccccgggctccatcggttttttttttttctcttcttctttctttttttttcttttttgacagaaaagataaatgccgatccgatgtctcagcctcattgtttctatggggcgtgggattgtgtgttcttctctgtggggctgggagtgtaataaggggggttaaatgacttcaaatgttgtgttatgctgtaaatggcgatataaatacagaatatgcttatgtatctgagcccgtgaagaattcaatattgccgaggctttggtattcagatatatgcacatgtgatatagcaggttcgttggtgaaatccaggggaaattccagacgcaaatggtaaatgtactttggcattgtattgtataatacaagtgtatcaagggaattgtttgaatttacatatggcatatttcacatttagtctactcagtgtgcgatctatgttgtaggtaacatatgaagcgtagaacaagatgctgggctttgcagtatcgaaatagcacagcttattgtgtcacagggcgagacacccaatcttgattccaaggcgactctgcacggaaagtcgaagtaatacggcgtatggggcgagttgcatacatcccaggttggattggctactggcattttactgcagagttgttgtacgtctatcttgtatatattgtactccgtatactccgtgcagtgtatacgaatataccaataccattctcaagctaaaatttagacaactcaaagctatccacatcggttcgacatccccggcgctacagtttgcactaaattgccaaactccacaatatgctccaattgaccactgtccctcttcggcgctgtcgaatctcatcagcactaatatgaaaagggcaggaggggcactgcaactgccgatatagttcgtgactaatttaatttaatttggccaattagacaggccgaaatattatgggtttcgctgcaaaggtggcgtttcttggagattttgatgtcggggatcttcgagaccgcatcgaggttgtgcgagggtgagcgtgcagggatctgggttgtacggctaaggtggtgtgtgtgtcgggcatcgtcatggttgaccggcatgtctacgttggatctttcctactgtggcagctgccatatgctatagggcttctaggatctgtgatcctgtgatcccgtgttcccatgggttctcaattgcataacttatgtctcattcagtggctacggtagatagtcatgttcctaacaagaggaagaatcaactaaaaaccccatcgaaacaaatcgcaagatctcaatcagagatgttccttcttgattcccatatctccattcaaatagccatgatggctatcgactcggccgtggacgccgagggatacgcagttcctatcgaactattcccccagggcaagaattccagagaacatcaggttgggttcatccatgaaatggaatcccggagccagagcgcagctggtggaataactagtcagtaaacaatcgtgtgggaaactgtaaacggacaacttacggatcaacctcgaagcctgcaatgcagtcgtacgctccctccttgatgctttgcaagaagttccaaccgtcatggaggtcgtagaaggagacgtagacattaacaccggacttggaaagacaagtgagtaggtacccaaaacatataaatactggcatgcaaacttacctcagcctgcttgatcagaatgcgttcgaagctcttcccaccccagtcagggccagcggcaatacccaagacgttttcattgtcggtagtcttgaagccagttggaagaccagagagagaaacgacgcgagaagcaccctcttgcacacgcttccagagttcggcgttatcctgcagcccctcctcgggcatgacaacagagatggtgatgtcgttatcgccatccttcagattgatcccctcgcaatggtcctcaaagtatttgacacagacgtcctgttcaacgaactgcacaataacttcgccattctcactccaggcacgttcgattgcaccgccgtagacaagctgcaggacgctggagatgtccgccaactccggaaggttcccgaaaacaatccgacgaggaggtccagccgggacagccttggatgccatctgcttctgcaagtgaagcaaacggacctgcttcatgaaatcaacaggagcagtaatacctctgggtctcttgggaggggctgcggagtcctcacccccggtggatccagccttcttggaaccagcggcggactcgttatctgcgtccttgctttcgccagcagctttgacaggagcggccttgtggggggcactcttcagaggcgcatgagcatgggcgacttcatccttgggtccagccggaacaaacggctcggcacgcggatcgatgccagagttcttcagggcaacggaggcacgcggggcagtggcacgagaagcagcagcttgcttgtcctattcaagatcagtgtgagacgggacgaagaaaggtaagtgctgtcctcggaagtggcggggatcgaggggacccatggacaaaaagaaaccaagggcagagaacaggaatgagtcgaatacaggagcagatgcacatgtggagatgtcaaggtgtggatggggcgtggatggaggaaggatgtgacgtacctttgcgagtttcatcgccttctcgatatccttcgaggcatcacaaagcttacgcggctcatcattaacattcacctgggtgaagcgacggccattgaggcgagccgacactgtcttcacaccagcgagacgatcagcacgagccttgttacgaacagcagcaggagcatgagcgctctcctccaggctaatcatgttgctgttggtaatcacgtcgtagatgacctcggtggtgatgcgaatgtctgcttgtctctgaagagaaaccggagcaagaccgttaggtccgatgactttggctttctccatgatggaacagagtatccagtatccgggtggggagaaggaaaaagagaagagggagaaaacaaaaacaatttatgtgacagacacgtgtaggtcgtgttaggatcaactgttcactttgggaaggcacgcctggcaaattgacgggctctctttccttttgggaacgttgccacaacgggaaggaacataccagtatgtatgtatatctttgcctacctatgtacattatgtagggtatatgtttctaaggtccttggatataccacctaggttacttaggtatagatattctaggatatcattcccataaggaacatatcatacctgtaagcatgttcacataagaacaggtctgggtatgtatgtatgctaaacaaagagatcttccagtgaacaaacagtgctcttgattgctcttctagagattgcttaggcttctaccaatctgtctcattgtgttataggatatcttgttcatcagctattacggacactagccaaatcactggaacgggctgtgagaccttttaagcatgatcttcttaggtcttctactaatagctcctccaagccagcaagggaacttcagctactctagtctcaggtaatcagtatctggaatataaaaccttctgggcctaatgtaagcagagtgtagattaccctttcgagttagtcttccctctttgtcccctttcgaggcttatgctatgacactatatctcagcctcacatccatattcttttgcctcacaaaccacgcattaacaatctcccattctgcacttggatcattgagttcaacctagaaagggctctagttagagtcggacctcattttggaaccatatcctcaccttatatcttagaaacaacgatggaatcagcttataaatctcaagcagactgatattcttgccaatgcatgtcctcggtccagccccgaaagtaaatgtcgcacgaagcatcttctgctttctatcctggaaatcagcctcagactcagtattcatcttgagccaccgttccggaacaaatgactccacatcctccccgaagatccagtggcgatgtattatccacggattagcaccgactatcgtgcccgccggtagaaacgggccatcaggaagctggagtccctcgacgggcacgacccgctcaagcatcaatcccacggccgggtgaagacgtagtgcttctttgatcactgcatcgaggtaagggagttgctcttggctttgtttccacgagacaggtaaagagatccgattttcttccaaggccatggtgagctcttggtgcagcttcatactcgcccggcggtccttgagggtgtaatacagtattgctcggagggaaatcgccgtcgtgtcggagccagcattcatattgctgatcgtatacgagaagacttggttatcgtttacaatagtcgggtgctcctttttcgcttccaaaaaccgatcgaggaagtccttgtgtgttttggccgctggtgatgtgcgttgctggttcagtcgttcatctagtcgtgcgcgagcaaagcgagctacagccccggtcgatcctcctccgaaaaggctcctgagtgggttcttgatgaaaatgtagtcaagccatggcatctgcccaatctatctctcaatctgattagctttattaattacctcatctgtcgcaatgccaacctttccggaatagtcgagcatgtgctccaacgcgacgatgatgccgtcgacgtcattccctttctccaggaacccaagtggcttactgaatgtcaattctccgatgacatcaaatgcatcttttcgagttacattggctcctgctctcatgttccacggggagaaatggaatacttacagtattgtagccaagcagcaatatcgcatactttagcttcagctacaaactcatccagtttcccaaatagggtatggatagtcctatcgacaaaaggctcgaattcggtcagggtactcatcgagtaagctgatgagacaggccttttaatagcagcatggaagttttcatcggttgtactaaatagtgtaggcgtcggtctgcctttggcaagctgctgctgaacagaatagaaatgtgtcttgggaatgttagcggaaaggccgatcagtttcttgcaacttggagacaccttttcatatcctttattaatgccatatatagttttcagggcatccaaattccgcacactgaccacgttaggtcctagtcgaacatagtccccgtgtttctggtggaggttgtgaagcgtcacttctgcacgaccattggcgacatcgatgaacctccaaagattcgttatcttagccagtaatggtccgggaattgacgttactcctggtttgagataattgcgagtgaagtggaataaggcaagggtaacaaggatggctggtagatttgaccagactgagatcaatgcttctgagatgatggccatggtgaatttcgatagctattgcctcctagtggtagtatagcaagtaaccactaggcatactatatataccatatccggggaaatgcggggaaatgggggaattccgcccttatagctatctgcggaaccggcctggtctgtagacttctgttcggatgctggcacatcatgatacttctttcgccaataaaaacaacgactaacctctctctacctcagcattttgctcttgttcccctcgctgccgtgatgaccttgatgggtatcccagaggagggatttcaactccggttccaggtgcttgctttgatacaccagagcggagtcttagctaaagcaagaggtataaacattggtatattattggtttatttaatgatcctaaagacgttaccaagaaaactattggtacaccaaagacaccgaaatgtaagcaaatctatatgacaagaatgggtagaatgggtatcgattccagaacattatagcttctacgacgggacaggaatattctcgaatcctttctgtccgggcttacggtcttcaacaataacttgcaggccacgacgaccacaatagccatcattgcccgcaacccggtcaacgacctggaaagagccgccaccatcctgcgcagcatccggaacccacacagtctcctgtacaatttgaccggggacttccgcacgacggggattgtgccagggcagaccgacaaggtgattgccaaggttgtgaaggaacgagtacaacccctcgaagcggcgggtgactccgagccaagagagggtgcggtggtcatatgccgtccgcacgaacgggttcatgtagatgcccgtatcggtgatctcgtcgacgttggtttgtgggtcttgaatgtccgcgtgaatgagacagcattcagacgcttcccagaagagatcgtgtccggagcggaaacgtgctgggttgggtgttgtaggcggcgagccgggttggaagtatttggcatcaaacgccaccattccgccccagcagctgcgcactcgcactgcgtctttgccggctagcacatcgcttcggctctcgcctttgccggatgatgtgaaccatgggtagaaggggagacccatgctgtagccttcaagatcgcgggtggcgtatgtgtcgtagaatttgaaggggttgtcgaagtctacggcgcaggctgcacggtattgggcaatgccgtcttcgttggcatttgttgagaataagagctgggggacatcggcgggatggaagaggatatcgttcagatagagtagcttatcgaatttcatatccgggtggtcggtcaatggctgtagtgctcggttccgaacctgggccaaatattcgatgcgcttgattcgctttgatccaccgggaatggtcacagtcggtacagtctttgggtccaggtgcttttcagacacaatggatttctggcactgcacttgttcctctaacgcgcgcaatgcgcgctctccctcctcgccactgtcattttcgtagatactcagaaacacattgtcagacccaagcagatcaatcaattccagaagttgcgttccccattggccttgtgcaagctcgccaccactatcatacaggcttgctgcaatgaagaccttctcctggcggggattgcctcgtccgggatacgagctctcgagtaatgatttccggagtgtagaataatgcgcgggcagatgggtatatgaggggaagagtatcgatgtgaaaagcgcgagaacaaaaacgatgccggcgacgacggggaggtagcaacagcggcggatacaaaaacgtcgagaacagctcggtcgtggcgtgcctgcgagggccggtctggaagtgttgtttaggcgacgataacccgctgctgccgtcgaaaagattcgagacagccagggcagttgacgttcgccgaatttggatgaataagggacctgcgcttcaaaatcggcttcgtcgaggttgaacgtcccctgcgaatcaattgaggatcgtgaggcaagctcccattcatcgggatgaagtagtcgtgtagtcatggtaggttgtgtcaccaaaggggtatacacccttgggactatcttcaactgcaacttggtccaataagctggcaccctgcagccatgattgatgatagtcaaaaagtaacctgggggccccacggagaacttacatcatcaatgtagtcacgtggtaccggtcgagtagatgatgtacatcgtggagctcaaatgtttctggacttctaggaatatgattgtaaatagcgaaataagatatagaacaaaagtgttaactcgagaatgtctacgtagcttttggatgaattcactagaaaacagttgcgcgccatgattttccgataaatgtccggtatgtagtgacgtagctgtagtcggggcactgcctgttttagtcgcataagtgagatcatttatctttctgctcactatctgagtttagatagtctggaatcctcaatcttccactttaaccaccctcttgtccaaatatatgacagacggcgtggtgactgaacatactccatctgtgattctaccactgcttccccgcattccacatcccaccatgtcgcaatcgcaattcaaattcgccaactcagatgccaaagttccaggcaacggtactctccctccagagtttatcatcaaagcaccagcttctacagatatatgggccaagccgccttccactatccgcttctcggccccgatcttgtacaagtctgtgccgctgaagtctttcaagcggatccgcgtcgccttcaatgccctttgggagaagaagtatgaccagggcggtgtgatcctggttctgaataccgccgatggtggccagaagtgggtgaagagcggcattgaactcacccacggcagaccccacctcagcgtcgtcgccaaagataactgggcggactggagcttgattccagtgccctcaggcggtggtgcagcaactcttgagctggtcaaggaaacggacaacagtctgtggatctatcttgtcgagggcttgcagaagtcccctatccgggaggtcacttgggtctttgacgaggagaatgtgaaggacttctgggttggtgtctatgctgctcggccatcaagtgagggcaaggacttttctgtcaatttcggacatttgattatcgaccaggaataggttagcgggatgttgtttggttatatgtcccagtaagtaaatggcgatggccactacgaagaacaacattatatatgacgagtaggataattgaaatgaagtacttcgtatagcgatactatttttccataaaccataatggggcatggcaggacgtccatcatcaatataggtagaattaaagatatcggcttgctgcagatatactacggctccacagagtttcaggtccacctgtgcatgtcccaaagatgactgatatggcgcagatcagccgatccgatgtgcggacaggttctagtcattcgaattgattccttcccagattcattgttc
